(19) United States
(12) Patent Application Publication
(10) Pub. No.: US 2019/0249173 A1
(43) Pub. Date: Aug. 15, 2019

(54) METHODS AND COMPOSITIONS OF BIOLOGICALLY ACTIVE AGENTS

(71) Applicants: Chandra VARGEESE, Cambridge, MA (US); Jason Jingxin ZHANG, Cambridge, MA (US); Sethumadhavan DIVAKARAMENON, Cambridge, MA (US); David Charles Donnell BUTLER, Cambridge, MA (US); Genliang LU, Cambridge, MA (US); Naoki IWAMOTO, Cambridge, MA (US); Hailin YANG, Cambridge, MA (US); Maria David FRANK-KAMENETSKY, Cambridge, MA (US); Subramanian MARAPPAN, Cambridge, MA (US); WAVE LIFE SCIENCES LTD., Singapore (SG)

(72) Inventors: Chandra Vargeese, Schwenksville, PA (US); Jason Jingxin Zhang, Walpole, MA (US); Sethumadhavan Divakaramenon, Lexington, MA (US); David Charles Donnell Butler, Medford, MA (US); Genliang Lu, Winchester, MA (US); Naoki Iwamoto, Brighton, MA (US); Hailin Yang, West Roxbury, MA (US); Maria David Frank-Kamenetsky, Brookline, MA (US); Subramanian Marappan, Acton, MA (US)

(21) Appl. No.: 16/098,658

(22) PCT Filed: May 3, 2017
(86) PCT No.: PCT/US2017/030777

§ 371 Date: Nov. 2, 2018

Related U.S. Application Data
(60) Provisional application No. 62/331,961, filed on May 4, 2016.
(60) Provisional application No. 62/405,810, filed on Oct. 7, 2016.

(51) Int. Cl. C12N 15/11; A61K 31/7088; A61K 47/54

(52) U.S. Cl. CPC C12N 15/111; A61K 31/7088; C12N 2310/3515; C12N 2310/315; A61K 47/542

(57) ABSTRACT

In some embodiments, the present disclosure pertains to compositions and methods related to delivery of a biologically active agent, wherein the compositions comprise a biologically active agent and a lipid. In various embodiments, the lipid is selected from: lauric acid, myristic acid, palmitic acid, stearic acid, oleic acid, linoleic acid, alpha-linolenic acid, gamma-linolenic acid, docosa-hexaenoic acid (cis-DHA), turbinaric acid and dilinoleyl. In some embodiments, a composition and method are useful for delivery of a biologically active agent to a particular cell or tissue, e.g., a muscle cell or tissue.

### CROSS-REFERENCE TO RELATED APPLICATIONS

[0001] This application claims priority to United States Provisional Application Nos. 62/331,961, filed May 4, 2016, and 62/405,810, filed Oct. 7, 2016, the entirety of each of which is incorporated herein by reference.

### SEQUENCE LISTING

[0002] The instant application contains a Sequence Listing which has been submitted electronically in ASCII format and is hereby incorporated by reference in its entirety. Said ASCII copy, created on Apr. 29, 2019, is named 2010581-0600_SL.txt and is 623,886 bytes in size.

### BACKGROUND

[0003] Many biologically active agents cannot be effectively delivered to their target locations, e.g., cells, tissues, organs, etc., thereby limiting their use as therapeutics. There is a long-felt need in the art for efficient and/or effective delivery of biologically active agents to such target locations. There is a particular long-felt need in the art for efficient and/or effective delivery of biologically active agents into cells (i.e., to intracellular sites).

### SUMMARY

[0004] Among other things, the present disclosure encompasses the recognition that lipids can surprisingly enable and/or promote delivery of biologically active agents to their target location(s) (e.g., cells, tissues, organs, etc.) In some embodiments, lipids can be utilized to effectively improve delivery of biologically active agents to their target location(s) in a subject, e.g., in a mammal or human subject, etc. The present disclosure particularly documents the surprising achievement of efficient and/or effective delivery of biologically active agent(s) into cells (i.e., to intracellular location(s)). In some embodiments, the present disclosure also demonstrates surprising achievements that lipids can improve many properties, e.g., pharmacokinetics (e.g., half-life), activities, immunogenicity, etc. of biologically active agents. For example, in some embodiments, the present disclosure demonstrates that lipids can be utilized to effectively improve immune characteristics of biologically active agents, e.g., by modulating immune responses mediated by TLR9.

[0005] In light of the findings provided herein, those skilled in the art will appreciate that use of lipids can permit or facilitate delivery of biologically active agents, particularly to intracellular locations. Furthermore, in light of the findings provided herein, those skilled in the art will appreciate that use of lipids as described herein may permit or facilitate delivery of an effective and/or desired amount of biologically active agent to its target location(s) so that, for example, a comparable or higher level of the biologically active agent is achieved at the target location(s) than is observed when the biologically active agent is administered absent the lipid, in some embodiments, even though a lower amount of the biologically active agent may be administered with the lipid than without. Alternatively or additionally, in light of the findings provided herein, those skilled in the art will appreciate that use of lipids as described herein may permit or facilitate improved distribution (i.e., increased relative level of biologically active agent at a target location(s) as compared with at a non-target location(s)) relative to an appropriate control (e.g., that level observed when the biologically active agent, e.g., oligonucleotide, is comparably administered absent the lipid). Furthermore, in light of the findings provided herein, those skilled in the art will appreciate that use of lipids as described herein may permit or facilitate improved efficacy and/or low toxicities relative to an relative control (e.g., absent the lipids), for example, in some embodiments, improved properties (e.g., activities, pharmacokinetics, etc.) may permit a lower unit doses and/or less frequent administrations; in some embodiments, improved properties and/or lower toxicities (e.g., improved pharmacokinetics, undesired immune responses mediated by TLR9) may permit, if desired, higher unit doses and/or more frequent administrations. Still further, in light of the findings provided herein, those skilled in the art will appreciate that use of lipids as described herein may render biologically active agents that have otherwise been considered unsuitable for therapeutic use to be successfully used for treating various diseases, disorders and/or conditions.

[0006] In some embodiments, the present disclosure encompasses certain surprising findings, including that certain lipids are particularly effective at delivering biologically active agents to particular types of cells and tissues, including, but not limited to, cells and tissues outside the liver (e.g., extra-hepatic), including, but not limited to, muscle cells and tissues. In some embodiments, the present disclosure provides technologies (compounds, compositions, methods, etc.) that are surprisingly effective at delivering biologically active agents to muscle cells and tissues, e.g., of heart, thoracic diaphragm, skeletal muscle cells and tissues, gastrocnemius, quadriceps, triceps, and/or smooth muscle cells and tissues, etc.

[0007] In some embodiments, the present disclosure provides a composition comprising a biologically active agent and a lipid. Many lipids can be utilized in provided technologies in accordance with the present disclosure. In some embodiments, a lipid comprises an optionally substituted, C₁₀-C₈₀ saturated or partially unsaturated aliphatic group, wherein one or more methylene units are optionally and independently replaced by an optionally substituted group selected from C₁-C₆ alkylene, C₁-C₆ alkenylene, —C≡C—, a C₁-C₆ heteroaliphatic moiety, —C(R′)₂—, -Cy-, —O—, —S—, —S—S—, —N(R′)—, —C(O)—, —C(S)—, —C(NR′)—, —C(O)N(R′)—, —N(R′)C(O)N(R′)—, —N(R′)C(O)—, —N(R′)C(O)O—, —OC(O)N(R′)—, —S(O)—, —S(O)₂—, —S(O)₂N(R′)—, —N(R′)S(O)₂—, —SC(O)—, —C(O)S—, —OC(O)—, and —C(O)O—, wherein each variable is independently as defined and described herein. In some embodiments, a lipid comprises an optionally substituted C₁₀-C₈₀ saturated or partially unsaturated, aliphatic chain. In some embodiments, a lipid comprises an optionally substituted C₁₀-C₈₀ linear, saturated or partially unsaturated, aliphatic chain. In some embodiments, a lipid comprises a C₁₀-C₈₀ linear, saturated or partially unsaturated, aliphatic chain, optionally substituted with one or more C₁₋₄ aliphatic group. In some embodiments, a lipid comprises an unsubstituted C₁₀-C₈₀ linear, saturated or partially unsaturated, aliphatic chain. In some embodiments, a lipid comprises no more than one optionally substituted C₁₀-C₈₀ linear, saturated or partially unsaturated, aliphatic chain. In some embodiments, a lipid comprises two or more optionally substituted C₁₀-C₈₀ linear, saturated or partially unsaturated, aliphatic chain. In some embodiments, a lipid comprises an optionally substituted C₁₀-C₈₀ saturated or partially unsaturated, aliphatic chain. In some embodiments, a lipid comprises an optionally substituted C₁₀-C₈₀ linear, saturated or partially unsaturated, aliphatic chain. In some embodiments, a lipid comprises a C₁₀-C₈₀ linear, saturated or partially unsaturated, aliphatic chain, optionally substituted with one or more C₁₋₄ aliphatic group. In some embodiments, a lipid comprises an unsubstituted C₁₀-C₈₀ linear, saturated or partially unsaturated, aliphatic chain. In some embodiments, a lipid comprises no more than one optionally substituted C₁₀-C₈₀ linear, saturated or partially unsaturated, aliphatic chain. In some embodiments, a lipid comprises two or more optionally substituted C₁₀-C₈₀ linear, saturated or partially unsaturated, aliphatic chain. In some embodiments, a lipid comprises an optionally substituted C₁₀-C₄₀ saturated or partially unsaturated, aliphatic chain. In some embodiments, a lipid comprises an optionally substituted C₁₀-C₄₀ linear, saturated or partially unsaturated, aliphatic chain. In some embodiments, a lipid comprises a C₁₀-C₄₀ linear, saturated or partially unsaturated, aliphatic chain, optionally substituted with one or more C₁₋₄ aliphatic group. In some embodiments, a lipid comprises an unsubstituted C₁₀-C₄₀ linear, saturated or partially unsaturated, aliphatic chain. In some embodiments, a lipid comprises no more than one optionally substituted C₁₀-C₈₀ linear, saturated or partially unsaturated, aliphatic chain. In some embodiments, a lipid comprises two or more optionally substituted C₁₀-C₄₀ linear, saturated or partially unsaturated, aliphatic chain.

[0008] In some embodiments, the present disclosure provides a composition comprising a biologically active agent and a lipid. Many lipids can be utilized in provided technologies in accordance with the present disclosure. In some embodiments, a lipid comprises an optionally substituted, C₁₀-C₆₀ saturated or partially unsaturated aliphatic group, wherein one or more methylene units are optionally and independently replaced by an optionally substituted group selected from C₁-C₆ alkylene, C₁-C₆ alkenylene, —C≡C—, a C₁-C₆ heteroaliphatic moiety, —C(R′)₂—, -Cy-, —O—, —S—, —S—S—, —N(R′)—, —C(O)—, —C(S)—, —C(NR′)—, —C(O)N(R′)—, —N(R′)C(O)N(R′)—, —N(R′)C(O)—, —N(R′)C(O)O—, —OC(O)N(R′)—, —S(O)—, —S(O)₂—, —S(O)₂N(R′)—, —N(R′)S(O)₂—, —SC(O)—, —C(O)S—, —OC(O)—, and —C(O)O—, wherein each variable is independently as defined and described herein. In some embodiments, a lipid comprises an optionally substituted C₁₀-C₈₀ saturated or partially unsaturated, aliphatic chain. In some embodiments, a lipid comprises an optionally substituted C₁₀-C₈₀ linear, saturated or partially unsaturated, aliphatic chain. In some embodiments, a lipid comprises a C₁₀-C₈₀ linear, saturated or partially unsaturated, aliphatic chain, optionally substituted with one or more C₁₋₄ aliphatic group. In some embodiments, a lipid comprises an unsubstituted C₁₀-C₈₀ linear, saturated or partially unsaturated, aliphatic chain. In some embodiments, a lipid comprises no more than one optionally substituted C₁₀-C₈₀ linear, saturated or partially unsaturated, aliphatic chain. In some embodiments, a lipid comprises two or more optionally substituted C₁₀-C₈₀ linear, saturated or partially unsaturated, aliphatic chain. In some embodiments, a lipid comprises an optionally substituted C₁₀-C₆₀ saturated or partially unsaturated, aliphatic chain. In some embodiments, a lipid comprises an optionally substituted C₁₀-C₆₀ linear, saturated or partially unsaturated, aliphatic chain. In some embodiments, a lipid comprises a C₁₀-C₆₀ linear, saturated or partially unsaturated, aliphatic chain, optionally substituted with one or more C₁₋₄ aliphatic group. In some embodiments, a lipid comprises an unsubstituted C₁₀-C₆₀ linear, saturated or partially unsaturated, aliphatic chain. In some embodiments, a lipid comprises no more than one optionally substituted C₁₀-C₆₀ linear, saturated or partially unsaturated, aliphatic chain. In some embodiments, a lipid comprises two or more optionally substituted C₁₀-C₆₀ linear, saturated or partially unsaturated, aliphatic chain. In some embodiments, a lipid comprises an optionally substituted C₁₀-C₄₀ saturated or partially unsaturated, aliphatic chain. In some embodiments, a lipid comprises an optionally substituted C₁₀-C₄₀ linear, saturated or partially unsaturated, aliphatic chain. In some embodiments, a lipid comprises a C₁₀-C₄₀ linear, saturated or partially unsaturated, aliphatic chain, optionally substituted with one or more C₁₋₄ aliphatic group. In some embodiments, a lipid comprises an unsubstituted C₁₀-C₄₀ linear, saturated or partially unsaturated, aliphatic chain. In some embodiments, a lipid comprises no more than one optionally substituted C₁₀-C₆₀ linear, saturated or partially unsaturated, aliphatic chain. In some embodiments, a lipid comprises two or more optionally substituted C₁₀-C₄₀ linear, saturated or partially unsaturated, aliphatic chain.

[0009] In some embodiments, the present disclosure provides a composition comprising a biologically active agent and a lipid. Many lipids can be utilized in provided technologies in accordance with the present disclosure. In some embodiments, a lipid comprises an optionally substituted, C₁₀-C₄₀ saturated or partially unsaturated aliphatic group, wherein one or more methylene units are optionally and independently replaced by an optionally substituted group selected from C₁-C₆ alkylene, C₁-C₆ alkenylene, —C≡C—, a C₁-C₆ heteroaliphatic moiety, —C(R′)₂—, -Cy-, —O—, —S—, —S—S—, —N(R′)—, —C(O)—, —C(S)—, —C(NR′)—, —C(O)N(R′)—, —N(R′)C(O)N(R′)—, —N(R′)C(O)—, —N(R′)C(O)O—, —OC(O)N(R′)—, —S(O)—, —S(O)₂—, —S(O)₂N(R′)—, —N(R′)S(O)₂—, —SC(O)—, —C(O)S—, —OC(O)—, and —C(O)O—, wherein each variable is independently as defined and described herein. In some embodiments, a lipid comprises an optionally substituted C₁₀-C₈₀ saturated or partially unsaturated, aliphatic chain. In some embodiments, a lipid comprises an optionally substituted C₁₀-C₈₀ linear, saturated or partially unsaturated, aliphatic chain. In some embodiments, a lipid comprises a C₁₀-C₈₀ linear, saturated or partially unsaturated, aliphatic chain, optionally substituted with one or more C₁₋₄ aliphatic group. In some embodiments, a lipid comprises an unsubstituted C₁₀-C₈₀ linear, saturated or partially unsaturated, aliphatic chain. In some embodiments, a lipid comprises no more than one optionally substituted C₁₀-C₈₀ linear, saturated or partially unsaturated, aliphatic chain. In some embodiments, a lipid comprises two or more optionally substituted C₁₀-C₈₀ linear, saturated or partially unsaturated, aliphatic chain. In some embodiments, a lipid comprises an optionally substituted C₁₀-C₄₀ saturated or partially unsaturated, aliphatic chain. In some embodiments, a lipid comprises an optionally substituted C₁₀-C₆₀ linear, saturated or partially unsaturated, aliphatic chain. In some embodiments, a lipid comprises a C₁₀-C₆₀ linear, saturated or partially unsaturated, aliphatic chain, optionally substituted with one or more C₁₋₄ aliphatic group. In some embodiments, a lipid comprises an unsubstituted C₁₀-C₆₀ linear, saturated or partially unsaturated, aliphatic chain. In some embodiments, a lipid comprises no more than one optionally substituted C₁₀-C₆₀ linear, saturated or partially unsaturated, aliphatic chain. In some embodiments, a lipid comprises two or more optionally substituted C₁₀-C₆₀ linear, saturated or partially unsaturated, aliphatic chain. In some embodiments, a lipid comprises an optionally substituted C₁₀-C₆₀ saturated or partially unsaturated, aliphatic chain. In some embodiments, a lipid comprises an optionally substituted C₁₀-C₄₀ linear, saturated or partially unsaturated, aliphatic chain. In some embodiments, a lipid comprises a C₁₀-C₄₀ linear, saturated or partially unsaturated, aliphatic chain, optionally substituted with one or more C₁₋₄ aliphatic group. In some embodiments, a lipid comprises an unsubstituted C₁₀-C₄₀ linear, saturated or partially unsaturated, aliphatic chain. In some embodiments, a lipid comprises no more than one optionally substituted C₁₀-C₄₀ linear, saturated or partially unsaturated, aliphatic chain. In some embodiments, a lipid comprises two or more optionally substituted C₁₀-C₄₀ linear, saturated or partially unsaturated, aliphatic chain.

[0010] In some embodiments, the present disclosure provides a composition comprising a biologically active agent and a lipid comprising a C₁₀-C₈₀ linear, saturated or partially unsaturated, aliphatic chain. In some embodiments, the present disclosure pertains to a composition comprising a biologically active agent and a lipid comprising a C₁₀-C₈₀ linear, saturated or partially unsaturated, aliphatic chain, optionally substituted with one or more C₁₋₄ aliphatic group. In some embodiments, the present disclosure provides a composition comprising a biologically active agent and a lipid comprising a C₁₀-C₆₀ linear, saturated or partially unsaturated, aliphatic chain. In some embodiments, the present disclosure pertains to a composition comprising a biologically active agent and a lipid comprising a C₁₀-C₆₀ linear, saturated or partially unsaturated, aliphatic chain, optionally substituted with one or more C₁₋₄ aliphatic group. In some embodiments, the present disclosure provides a composition comprising a biologically active agent and a lipid comprising a C₁₀-C₄₀ linear, saturated or partially unsaturated, aliphatic chain. In some embodiments, the present disclosure pertains to a composition comprising a biologically active agent and a lipid comprising a C₁₀-C₄₀ linear, saturated or partially unsaturated, aliphatic chain, optionally substituted with one or more C₁₋₄ aliphatic group.

[0011] In some embodiments, the present disclosure pertains to a composition comprising a biologically active agent and a lipid selected from the group consisting of: lauric acid, myristic acid, palmitic acid, stearic acid, oleic acid, linoleic acid, alpha-linolenic acid, gamma-linolenic acid, docosahexaenoic acid (cis-DHA), turbinaric acid and dilinoleyl. In some embodiments, a lipid has a structure of any of:

[chemical structure]

[0012] In some embodiments, a lipid is conjugated to a biologically active agent. A person having ordinary skill in the art appreciates that various technologies can be utilized to conjugate lipids to biologically active agent in accordance with the present disclosure. In some embodiments, a lipid is not conjugated to a biologically active agent.

[0013] Various biologically active agents can be effectively delivered to their targets in accordance with the present disclosure. In some embodiments, a biologically active agent is selected from the group consisting of: a small molecule, a peptide, a protein, a component of a CRISPR-Cas system, a carbohydrate, a therapeutic agent, a chemotherapeutic agent, a vaccine, a nucleic acid, and a lipid. In some embodiments, a nucleic acid comprises one or more: nucleotides (e.g., natural nucleotides, modified nucleotides nucleotide analogs, etc.). In some embodiments, a nucleic acid is an oligonucleotide, an antisense oligonucleotide, an RNAi agent, a miRNA, immunomodulatory nucleic acid, an aptamer, a Piwi-interacting RNA (piRNA), a small nucleolar RNA (snoRNA), a ribozyme, a mRNA, a lncRNA, a ncRNA, an antigomir (e.g., an antagonist to a miRNA, lncRNA, ncRNA or other nucleic acid), a plasmid, a vector, or a portion thereof. In some embodiments, a biologically active agent is an oligonucleotide. In some embodiments, the present disclosure provides compositions comprising an oligonucleotide and a lipid. Among other things, such compositions are surprisingly effective at delivering oligonucleotides to their target locations, in some embodiments, delivering oligonucleotides into the cells at the target locations. In some embodiments, provided technologies are surprisingly effective at delivering oligonucleotides to muscle cells, tissues, etc. In some embodiments, provided compounds, for example, oligonucleotides conjugated with lipids, have unexpectedly improved properties, e.g., improved activities, improved pharmacokinetics, lowered toxicities (e.g., lowered undesired immuno responses), improved delivery to targets (e.g., cells, tissues, organs, organisms, etc.), etc. In some embodiments, an oligonucleotide is an oligonucleotide described in Patent Application Publications US20120316224, US20140194610, US20150211006, and WO2015107425, and U.S. Pat. Nos. 9,243,245; 9,249,416; 9,175,286; 9,234,198; 8,895,309; 8,741,863; 8,097,596; 5,854,223; 5,756,476; and 8,871,918; the oligonucleotides and oligonucleotide compositions of each of which are incorporated herein by reference. In some embodiments, an oligonucleotide comprises one or more chiral internucleotidic linkages. In some embodiments, for oligonucleotides comprising one or more chiral internucleotidic linkages, a provided composition is a stereorandom composition of such oligonucleotides in that stereochemistry of each of the chiral internucleotidic linkages is not controlled. In some embodiments, a stereorandom composition is prepared by oligonucleotide synthesis without dedicated efforts e.g., through chiral auxiliaries, etc. to control the stereochemistry of each chiral internucleotidic linkages. In some embodiments, for oligonucleotides comprising one or more chiral internucleotidic linkages, a provided composition is a chirally controlled oligonucleotide composition of such oligonucleotides in that stereochemistry of at least one of the chiral internucleotidic linkages is controlled. In some embodiments, stereochemistry of each of the chiral internucleotidic linkages is independently controlled, and a provided composition is a completely chirally controlled oligonucleotide composition. In some embodiments, stereochemistry of one or more chiral internucleotidic linkages is controlled (chiral controlled internucleotidic linkages) while stereochemistry of one or more chiral internucleotidic linkages is not controlled (stereorandom/non-chirally controlled internucleotidic linkages), and a provided composition is a partially chirally controlled oligonucleotide composition. In some embodiments, a chirally controlled oligonucleotide composition can be prepared by oligonucleotide synthesis comprising stereoselective formation of one or more or all chiral internucleotidic linkages using, for example, technologies described in Patent Application Publications US20120316224, US20140194610, US20150211006, and WO2015107425, the technologies of each of which are incorporated herein by reference. In some embodiments, a provided composition comprises a chirally controlled oligonucleotide composition described in Patent Application Publications US20120316224, US20140194610, US20150211006, and WO2015107425, the chirally controlled oligonucleotide compositions of each of which are incorporated herein by reference, and a lipid. In some embodiments, a lipid is conjugated to oligonucleotides comprising stereochemically controlled internucleotidic linkages.

[0014] In some embodiments, the present disclosure provides a chirally controlled oligonucleotide composition comprising a plurality of oligonucleotides, which share: 1) a common base sequence;
[0015] 2) a common pattern of backbone linkages; and
[0016] 3) a common pattern of backbone phosphorus modifications;
   wherein:
[0017] the composition is chirally controlled in that the plurality of oligonucleotides share the same stereochemistry at one or more chiral internucleotidic linkages, and level of the plurality of oligonucleotides in the composition is pre-determined;
[0018] one or more oligonucleotides of the plurality are independently conjugated to a lipid; and one or more oligonucleotides of the plurality are optionally and independently conjugated to a target component.

[0019] In some embodiments, the present disclosure provides a chirally controlled oligonucleotide composition comprising a plurality of oligonucleotides, which share:
[0020] 1) a common base sequence;
[0021] 2) a common pattern of backbone linkages; and
[0022] 3) a common pattern of backbone phosphorus modifications;
   wherein:
[0023] the composition is chirally controlled in that the plurality of oligonucleotides share the same stereochemistry at one or more chiral internucleotidic linkages, and at least 0.5%, 1%, 2%, 3%, 4%, 5%, 6%, 7%, 8%, 9%, 10%, 15%, 20%, 25%, 30%, 35%, 40%, 45%, 50%, 55%, 60%, 65%, 70%, 75%, 80%, 85%, 90%, 91%, 92%, 93%, 94%, 95%, 96%, 97%, 98% or 99% of oligonucleotides in the composition that share the common base sequence, the common pattern of backbone linkages; and the common pattern of backbone phosphorus modifications share the same stereochemistry at the one or more chiral internucleotidic linkages;
[0024] one or more oligonucleotides of the plurality are independently conjugated to a lipid; and one or more oligonucleotides of the plurality are optionally and independently conjugated to a target component.

[0025] In some embodiments, the present disclosure provides an oligonucleotide composition comprising a plurality of oligonucleotides having the structure of:

A^{c}-[-L^{LD}-(R^{LD})ₐ]_{b}, or [(A^{c})ₐ-L^{LD}]_{b}—R^{LD},

wherein:
[0026] A^{c} is a biologically active agent;
[0027] a is 1-1000;
[0028] b is 1-1000;
[0029] each L^{LD} is independently a linker moiety or a covalent bond; and
[0030] each R^{LD} is independently a lipid moiety or a targeting component.

[0031] In some embodiments, the present disclosure provides an oligonucleotide composition comprising a plurality of oligonucleotides having the structure of:

A^{c}-[-L^{LD}-(R^{LD})ₐ]_{b}, or [(A^{c})ₐ-L^{LD}]_{b}—R^{LD},

wherein:
[0032] A^{c} is a biologically active agent;
[0033] a is 1-1000;
[0034] b is 1-1000;
[0035] each L^{LD} is independently a linker moiety; and
[0036] each R^{LD} is independently a lipid moiety or a targeting component, wherein at least one R^{LD} is a lipid moiety.

[0037] In some embodiments, the present disclosure provides an oligonucleotide composition comprising a plurality of oligonucleotides having the structure of:

A^{c}-[-L^{LD}-(R^{LD})ₐ]_{b}, or [(A^{c})ₐ-L^{LD}]_{b}—R^{LD},

wherein:
[0038] A^{c} is a biologically active agent;
[0039] a is 1-1000;
[0040] b is 1-1000;
[0041] each L^{LD} is independently a covalent bond or an optionally substituted, C₁-C₈₀ saturated or partially unsaturated aliphatic group, wherein one or more methylene units are optionally and independently replaced by T^{LD} or an optionally substituted group selected from C₁-C₆ alkylene, C₁-C₆ alkenylene, —C≡C—, a C₁-C₆ heteroaliphatic moiety, —C(R′)₂—, -Cy-, —O—, —S—, —S—S—, —N(R′)—, —C(O)—, —C(S)—, —C(NR′)—, —C(O)N(R′)—, —N(R′)C(O)N(R′)—, —N(R′)C(O)—, —N(R′)C(O)O—, —OC(O)N(R′)—, —S(O)—, —S(O)₂—, —S(O)₂N(R′)—, —N(R′)S(O)₂—, —SC(O)—, —C(O)S—, —OC(O)—, and —C(O)O—;
[0042] each R^{LD} is independently an optionally substituted, C₁-C₈₀ saturated or partially unsaturated aliphatic group, wherein one or more methylene units are optionally and independently replaced by an optionally substituted group selected from C₁-C₆ alkylene, C₁-C₆ alkenylene, —C≡C—, a C₁-C₆ heteroaliphatic moiety, —C(R′)₂—, -Cy-, —O—, —S—, —S—S—, —N(R′)—, —C(O)—, —C(S)—, —C(NR′)—, —C(O)N(R′)—, —N(R′)C(O)N(R′)—, —N(R′)C(O)—, —N(R′)C(O)O—, —OC(O)N(R′)—, —S(O)—, —S(O)₂—, —S(O)₂N(R′)—, —N(R′)S(O)₂—, —SC(O)—, —C(O)S—, —OC(O)—, and —C(O)O—;
[0043] T^{LD} has the structure of:

[chemical structure]

[0044] W is O, S or Se;
[0045] each of X, Y and Z is independently —O—, —S—, —N(-L-R¹)—, or L;
[0046] L is a covalent bond or an optionally substituted, linear or branched C₁-C₁₀ alkylene, wherein one or more methylene units of L are optionally and independently replaced by an optionally substituted group selected from C₁-C₆ alkylene, C₁-C₆ alkenylene, —C≡C—, a C₁-C₆ heteroaliphatic moiety, —C(R′)₂—, -Cy-, —O—, —S—, —S—S—, —N(R′)—, —C(O)—, —C(S)—, —C(NR′)—, —C(O)N(R′)—, —N(R′)C(O)N(R′)—, —N(R′)C(O)—, —N(R′)C(O)O—, —OC(O)N(R′)—, —S(O)—, —S(O)₂—, —S(O)₂N(R′)—, —N(R′)S(O)₂— —SC(O)—, —C(O)S—, —OC(O)—, and —C(O)O—;
[0047] R¹ is halogen, R, or an optionally substituted C₁-C₅₀ aliphatic wherein one or more methylene units are optionally and independently replaced by an optionally substituted group selected from C₁-C₆ alkylene, C₁-C₆ alkenylene, —C≡C—, a C₁-C₆ heteroaliphatic moiety, —C(R′)₂—, -Cy-, —O—, —S—, —S—S—, —N(R′)—, —C(O)—, —C(S)—, —C(NR′)—, —C(O)N(R′)—, —N(R′)C(O)N(R′)—, —N(R′)C(O)—, —N(R′)C(O)O—, —OC(O)N(R′)—, —S(O)—, —S(O)₂—, —S(O)₂N(R′)—, —N(R′)S(O)₂— —SC(O)—, —C(O)S—, —OC(O)—, and —C(O)O—
[0048] each R′ is independently —R, —C(O)R, —CO₂R, or —SO₂R, or:
   [0049] two R′ are taken together with their intervening atoms to form an optionally substituted aryl, carbocyclic, heterocyclic, or heteroaryl ring;
[0050] -Cy- is an optionally substituted bivalent ring selected from phenylene, carbocyclylene, arylene, heteroarylene, and heterocyclylene; and
[0051] each R is independently hydrogen, or an optionally substituted group selected from C₁-C₆ aliphatic, carbocyclyl, aryl, heteroaryl, and heterocyclyl.

[0052] In some embodiments, A^{c} is an oligonucleotide chain ([H]_{b}-A^{c} is an oligonucleotide). In some embodiments, [H]_{b}-A^{c} is an oligonucleotide of any of the Tables. In some embodiments, H-A^{c} is a small molecule. In some embodiments, H-A^{c} is a peptide. In some embodiments, H-A^{c} is a protein.

[0053] In some embodiments, P in T^{LD} is P*. In some embodiments, a conjugate has the structure of [(A^{c})ₐ-L^{LD}]_{b}—R^{LD}. In some embodiments, a conjugate has the structure of (A^{c})ₐ-L^{LD}-R^{LD}. In some embodiments, a is 1-100. In some embodiments, a is 1-50. In some embodiments, a is 1-40. In some embodiments, a is 1-30. In some embodiments, a is 1-20. In some embodiments, a is 1-15. In some embodiments, a is 1-10. In some embodiments, a is 1-9. In some embodiments, a is 1-8. In some embodiments, a is 1-7. In some embodiments, a is 1-6. In some embodiments, a is 1-5. In some embodiments, a is 1-4. In some embodiments, a is 1-3. In some embodiments, a is 1-2. In some embodiments, a is 1. In some embodiments, a is 2. In some embodiments, a is 3. In some embodiments, a is 4. In some embodiments, a is 5. In some embodiments, a is 6. In some embodiments, a is 7. In some embodiments, a is 8. In some embodiments, a is 9. In some embodiments, a is 10. In some embodiments, a is more than 10. In some embodiments, b is 1-100. In some embodiments, b is 1-50. In some embodiments, b is 1-40. In some embodiments, b is 1-30. In some embodiments, b is 1-20. In some embodiments, b is 1-15. In some embodiments, b is 1-10. In some embodiments, b is 1-9. In some embodiments, b is 1-8. In some embodiments, b is 1-7. In some embodiments, b is 1-6. In some embodiments, b is 1-5. In some embodiments, b is 1-4. In some embodiments, b is 1-3. In some embodiments, b is 1-2. In some embodiments, b is 1. In some embodiments, b is 2. In some embodiments, b is 3. In some embodiments, b is 4. In some embodiments, b is 5. In some embodiments, b is 6. In some embodiments, b is 7. In some embodiments, b is 8. In some embodiments, b is 9. In some embodiments, b is 10. In some embodiments, b is more than 10. In some embodiments, a conjugate has the structure of A^{c}-L^{LD}-R^{LD}. In some embodiments, A^{c} is conjugated through one or more of its sugar, base and/or internucleotidic linkage moieties. In some embodiments, A^{c} is conjugated through its 5′-OH (5′-O—). In some embodiments, A^{c} is conjugated through its 3′-OH (3′-O—). In some embodiments, before conjugation, A^{c}-(H)_{b} (b is an integer of 1-1000 depending on valency of A^{c}) is an oligonucleotide as described herein, for example, one of those described in any one of the Tables. In some embodiments, L^{LD} is -L-. In some embodiments, L^{LD} comprises a phosphorothioate group. In some embodiments, L^{LD} is —C(O)NH—(CH₂)₆—OP(═O)(S⁻)—O—. In some embodiments, the —C(O)NH end is connected to R^{L}D, and the —O— end is connected to the oligonucleotide, e.g., through 5′- or 3′-end. In some embodiments, R^{LD} is optionally substituted C₁₀, C₁₅, C₁₆, C₁₇, C₁₈, C₁₉, C₂₀, C₂₁, C₂₂, C₂₃, C₂₄, or C₂₅ to C₂₀, C₂₁, C₂₂, C₂₃, C₂₄, C₂₅, C₂₆, C₂₇, C₂₈, C₂₉, C₃₀, C₃₅, C₄₀, C₄₅, C₅₀, C₆₀, C₇₀, or C₈₀ aliphatic. In some embodiments, R^{LD} is optionally substituted C₁₀₋₈₀ aliphatic. In some embodiments, R^{LD} is optionally substituted C₂₀₋₈₀ aliphatic. In some embodiments, R^{LD} is optionally substituted C₁₀₋₇₀ aliphatic. In some embodiments, R^{LD} is optionally substituted C₂₀₋₇₀ aliphatic. In some embodiments, R^{LD} is optionally substituted C₁₀₋₆₀ aliphatic. In some embodiments, R^{LD} is optionally substituted C₂₀₋₆₀ aliphatic. In some embodiments, R^{LD} is optionally substituted C₁₀₋₅₀ aliphatic. In some embodiments, R^{LD} is optionally substituted C₂₀₋₅₀ aliphatic. In some embodiments, R^{LD} is optionally substituted C₀₋₄₀ aliphatic. In some embodiments, R^{LD} is optionally substituted C₂₀₋₄₀ aliphatic. In some embodiments, R^{LD} is optionally substituted C₁₀₋₃₀ aliphatic. In some embodiments, R^{LD} is optionally substituted C₂₀₋₃₀ aliphatic. In some embodiments, R^{LD} is unsubstituted C₁₀, C₁₅, C₁₆, C₁₇, C₁₈, C₁₉, C₂₀, C₂₁, C₂₂, C₂₃, C₂₄, or C₂₅ to C₂₀, C₂₁, C₂₂, C₂₃, C₂₄, C₂₅, C₂₆, C₂₇, C₂₈, C₂₉, C₃₀, C₃₅, C₄₀, C₄₅, C₅₀, C₆₀, C₇₀, or C₈₀ aliphatic. In some embodiments, R^{LD} is unsubstituted C₁₀₋₈₀ aliphatic. In some embodiments, R^{LD} is unsubstituted C₂₀₋₈₀ aliphatic. In some embodiments, R^{LD} is unsubstituted C₁₀₋₇₀ aliphatic. In some embodiments, R^{LD} is unsubstituted C₂₀₋₇₀ aliphatic. In some embodiments, R^{LD} is unsubstituted C₁₀₋₆₀ aliphatic. In some embodiments, R^{LD} is unsubstituted C₂₀₋₆₀ aliphatic. In some embodiments, R^{LD} is unsubstituted C₁₀₋₅₀ aliphatic. In some embodiments, R^{LD} is unsubstituted C₂₀₋₅₀ aliphatic. In some embodiments, R^{LD} is unsubstituted C₁₀₋₄₀ aliphatic. In some embodiments, R^{LD} is unsubstituted C₂₀₋₄₀ aliphatic. In some embodiments, R^{LD} is unsubstituted C₁₀₋₃₀ aliphatic. In some embodiments, R^{LD} is unsubstituted C₂₀₋₃₀ aliphatic.

[0054] In some embodiments, a plurality of oligonucleotides share the same stereochemistry at one or more chiral internucleotidic linkages (chirally controlled internucleotidic linkages). In some embodiments, they share the same stereochemistry at two or more chiral internucleotidic linkages. In some embodiments, they share the same stereochemistry at three or more chiral internucleotidic linkages. In some embodiments, they share the same stereochemistry at four or more chiral internucleotidic linkages. In some embodiments, they share the same stereochemistry at five or more chiral internucleotidic linkages. In some embodiments, they share the same stereochemistry at six or more chiral internucleotidic linkages. In some embodiments, they share the same stereochemistry at seven or more chiral internucleotidic linkages. In some embodiments, they share the same stereochemistry at eight or more chiral internucleotidic linkages. In some embodiments, they share the same stereochemistry at nine or more chiral internucleotidic linkages. In some embodiments, they share the same stereochemistry at ten or more chiral internucleotidic linkages. In some embodiments, they share the same stereochemistry at 11 or more chiral internucleotidic linkages. In some embodiments, they share the same stereochemistry at 12 or more chiral internucleotidic linkages. In some embodiments, they share the same stereochemistry at 13 or more chiral internucleotidic linkages. In some embodiments, they share the same stereochemistry at 14 or more chiral internucleotidic linkages. In some embodiments, they share the same stereochemistry at 15 or more chiral internucleotidic linkages. In some embodiments, they share the same stereochemistry at 10% or more of the chiral internucleotidic linkages. In some embodiments, they share the same stereochemistry at 20% or more of the chiral internucleotidic linkages. In some embodiments, they share the same stereochemistry at 30% or more of the chiral internucleotidic linkages. In some embodiments, they share the same stereochemistry at 40% or more of the chiral internucleotidic linkages. In some embodiments, they share the same stereochemistry at 50% or more of the chiral internucleotidic linkages. In some embodiments, they share the same stereochemistry at 60% or more of the chiral internucleotidic linkages. In some embodiments, they share the same stereochemistry at 70% or more of the chiral internucleotidic linkages. In some embodiments, they share the same stereochemistry at 80% or more of the chiral internucleotidic linkages. In some embodiments, they share the same stereochemistry at 90% or more of the chiral internucleotidic linkages. In some embodiments, they share the same stereochemistry at 95% or more of the chiral internucleotidic linkages. In some embodiments, they share the same stereochemistry at 96% or more of the chiral internucleotidic linkages. In some embodiments, they share the same stereochemistry at 97% or more of the chiral internucleotidic linkages. In some embodiments, they share the same stereochemistry at 98% or more of the chiral internucleotidic linkages. In some embodiments, they share the same stereochemistry at each of the chiral internucleotidic linkages. As readily appreciated by a person having ordinary skill in the art and illustrated the examples, chiral internucleotidic linkages where a plurality of oligonucleotides share the same stereochemistry can independently be either Rp or Sp, e.g., at a first chiral internucleotidic linkage a plurality of oligonucleotides are all Rp while at a second position they are all Sp (RpSp; can also be RpRp, SpSp, or SpRp as desired).

[0055] In some embodiments, at least 1%, 2%, 3%, 4%, 5%, 6%, 7%, 8%, 9%, 10%, 15%, 20%, 25%, 30%, 35%, 40%, 45%, 50%, 55%, 60%, 65%, 70%, 75%, 80%, 85%, 90%, 91%, 92%, 93%, 94%, 95%, 96%, 97%, 98% or 99% of oligonucleotides in a provided composition that share the common base sequence, the common pattern of backbone linkages; and the common pattern of backbone phosphorus modifications share the same stereochemistry at the one or more chiral internucleotidic linkages. In some embodiments, the percentage is at least 0.5%. In some embodiments, the percentage is at least 1%. In some embodiments, the percentage is at least 2%. In some embodiments, the percentage is at least 3%. In some embodiments, the percentage is at least 4%. In some embodiments, the percentage is at least 5%. In some embodiments, the percentage is at least 6%. In some embodiments, the percentage is at least 7%. In some embodiments, the percentage is at least 8%. In some embodiments, the percentage is at least 9%. In some embodiments, the percentage is at least 10%. In some embodiments, the percentage is at least 20%. In some embodiments, the percentage is at least 30%. In some embodiments, the percentage is at least 40%. In some embodiments, the percentage is at least 50%. In some embodiments, the percentage is at least 60%. In some embodiments, the percentage is at least 70%. In some embodiments, the percentage is at least 75%. In some embodiments, the percentage is at least 80%. In some embodiments, the percentage is at least 81%. In some embodiments, the percentage is at least 82%. In some embodiments, the percentage is at least 83%. In some embodiments, the percentage is at least 84%. In some embodiments, the percentage is at least 85%. In some embodiments, the percentage is at least 86%. In some embodiments, the percentage is at least 87%. In some embodiments, the percentage is at least 88%. In some embodiments, the percentage is at least 89%. In some embodiments, the percentage is at least 90%. In some embodiments, the percentage is at least 91%. In some embodiments, the percentage is at least 92%. In some embodiments, the percentage is at least 93%. In some embodiments, the percentage is at least 94%. In some embodiments, the percentage is at least 95%. In some embodiments, the percentage is at least 96%. In some embodiments, the percentage is at least 97%. In some embodiments, the percentage is at least 98%. In some embodiments, the percentage is at least 99%.

[0056] In some embodiments, oligonucleotides that share the common base sequence, the common pattern of backbone linkages, the common pattern of backbone phosphorus modifications and the same stereochemistry at the one or more chiral internucleotidic linkages are enriched, for example, relative to oligonucleotides that share the common base sequence, the common pattern of backbone linkages, the common pattern of backbone phosphorus modifications but not the same stereochemistry at the one or more chiral internucleotidic linkages. In some embodiments, as understood by a person having ordinary skill in the art, the enrichment is from the use of one or more provided technologies that enable stereoselective (chirally controlled) formation of each of the internucleotidic linkages where the oligonucleotides share the same stereochemistry.

[0057] In some embodiments, oligonucleotides that share the common base sequence, the common pattern of backbone linkages, the common pattern of backbone phosphorus modifications and the same stereochemistry at the one or more chiral internucleotidic linkages are enriched at least 5 fold (such oligonucleotides have a fraction of 5*(½ⁿ) of oligonucleotides that share the common base sequence, the common pattern of backbone linkages, and the common pattern of backbone phosphorus modifications, wherein n is the number of internucleotidic linkages where such oligonucleotides share the same stereochemistry; or oligonucleotides that share the common base sequence, the common pattern of backbone linkages, the common pattern of backbone phosphorus modifications but not the same stereochemistry at the one or more chiral internucleotidic linkages are no more than [1−(½ⁿ)]/5 of oligonucleotides that share the common base sequence, the common pattern of backbone linkages, and the common pattern of backbone phosphorus modifications) compared to a stereorandom preparation of the oligonucleotides wherein none of the internucleotidic linkages are chirally controlled (oligonucleotides that share the common base sequence, the common pattern of backbone linkages, the common pattern of backbone phosphorus modifications, and the same stereochemistry at the one or more chiral internucleotidic linkages are typically considered to have a fraction of ½ⁿ of oligonucleotides that share the common base sequence, the common pattern of backbone linkages, and the common pattern of backbone phosphorus modifications, wherein n is the number of chiral internucleotidic linkages wherein the oligonucleotides share the same stereochemistry, and oligonucleotides that share the common base sequence, the common pattern of backbone linkages, the common pattern of backbone phosphorus modifications but are not of the particular oligonucleotide type are typically considered to have a fraction of [1−(½n)] of oligonucleotides that share the common base sequence, the common pattern of backbone linkages, and the common pattern of backbone phosphorus modifications). In some embodiments, the enrichment is at least 20 fold. In some embodiments, the enrichment is at least 30 fold. In some embodiments, the enrichment is at least 40 fold. In some embodiments, the enrichment is at least 50 fold. In some embodiments, the enrichment is at least 60 fold. In some embodiments, the enrichment is at least 70 fold. In some embodiments, the enrichment is at least 80 fold. In some embodiments, the enrichment is at least 90 fold. In some embodiments, the enrichment is at least 100 fold. In some embodiments, the enrichment is at least 200 fold. In some embodiments, the enrichment is at least 300 fold. In some embodiments, the enrichment is at least 400 fold. In some embodiments, the enrichment is at least 500 fold. In some embodiments, the enrichment is at least 600 fold. In some embodiments, the enrichment is at least 700 fold. In some embodiments, the enrichment is at least 800 fold. In some embodiments, the enrichment is at least 900 fold. In some embodiments, the enrichment is at least 1,000 fold. In some embodiments, the enrichment is at least 2,000 fold. In some embodiments, the enrichment is at least 4,000 fold. In some embodiments, the enrichment is at least 8,000 fold. In some embodiments, the enrichment is at least 10,000 fold. In some embodiments, the enrichment is at least 20,000 fold. In some embodiments, the enrichment is at least (1.5)ⁿ. In some embodiments, the enrichment is at least (1.6)ⁿ. In some embodiments, the enrichment is at least (1.7)ⁿ. In some embodiments, the enrichment is at least (1.1)ⁿ. In some embodiments, the enrichment is at least (1.8)ⁿ. In some embodiments, the enrichment is at least (1.9)ⁿ. In some embodiments, the enrichment is at least 2ⁿ. In some embodiments, the enrichment is at least 3ⁿ. In some embodiments, the enrichment is at least 4ⁿ. In some embodiments, the enrichment is at least 5ⁿ. In some embodiments, the enrichment is at least 6ⁿ. In some embodiments, the enrichment is at least 7ⁿ. In some embodiments, the enrichment is at least 8ⁿ. In some embodiments, the enrichment is at least 9ⁿ. In some embodiments, the enrichment is at least 10ⁿ. In some embodiments, the enrichment is at least 15ⁿ. In some embodiments, the enrichment is at least 20ⁿ. In some embodiments, the enrichment is at least 25ⁿ. In some embodiments, the enrichment is at least 30ⁿ. In some embodiments, the enrichment is at least 40ⁿ. In some embodiments, the enrichment is at least 50ⁿ. In some embodiments, the enrichment is at least 100ⁿ. In some embodiments, enrichment is measured by increase of the fraction of oligonucleotides that share the common base sequence, the common pattern of backbone linkages, the common pattern of backbone phosphorus modifications and the same stereochemistry at the one or more chiral internucleotidic linkages. In some embodiments, an enrichment is measured by decrease of the fraction of oligonucleotides that share the common base sequence, the common pattern of backbone linkages, the common pattern of backbone phosphorus modifications but not the same stereochemistry at the one or more chiral internucleotidic linkages.

[0058] In some embodiments, oligonucleotides of a particular type in a chirally controlled oligonucleotide composition are structurally identical (including stereochemically) and are enriched at least 5 fold (oligonucleotides of the particular type have a fraction of 5*(½ⁿ) of oligonucleotides that have the base sequence, the pattern of backbone linkages, and the pattern of backbone phosphorus modifications of the particular oligonucleotide type, wherein n is the number of chiral internucleotidic linkages; or oligonucleotides that have the base sequence, the pattern of backbone linkages, and the pattern of backbone phosphorus modifications of the particular oligonucleotide type but are not of the particular oligonucleotide type are no more than [1−(½ⁿ)]/5 of oligonucleotides that have the base sequence, the pattern of backbone linkages, and the pattern of backbone phosphorus modifications of the particular oligonucleotide type) compared to a stereorandom preparation of the oligonucleotides (oligonucleotides of the particular type are typically considered to have a fraction of ½ⁿ of oligonucleotides that have the base sequence, the pattern of backbone linkages, and the pattern of backbone phosphorus modifications of the particular oligonucleotide type, wherein n is the number of chiral internucleotidic linkages, and oligonucleotides that have the base sequence, the pattern of backbone linkages, and the pattern of backbone phosphorus modifications of the particular oligonucleotide type but are not of the particular oligonucleotide type are typically considered to have a fraction of [1-(½ⁿ)] of oligonucleotides that have the base sequence, the pattern of backbone linkages, and the pattern of backbone phosphorus modifications of the particular oligonucleotide type). In some embodiments, the enrichment is at least 20 fold. In some embodiments, the enrichment is at least 30 fold. In some embodiments, the enrichment is at least 40 fold. In some embodiments, the enrichment is at least 50 fold. In some embodiments, the enrichment is at least 60 fold. In some embodiments, the enrichment is at least 70 fold. In some embodiments, the enrichment is at least 80 fold. In some embodiments, the enrichment is at least 90 fold. In some embodiments, the enrichment is at least 100 fold. In some embodiments, the enrichment is at least 200 fold. In some embodiments, the enrichment is at least 300 fold. In some embodiments, the enrichment is at least 400 fold. In some embodiments, the enrichment is at least 500 fold. In some embodiments, the enrichment is at least 600 fold. In some embodiments, the enrichment is at least 700 fold. In some embodiments, the enrichment is at least 800 fold. In some embodiments, the enrichment is at least 900 fold. In some embodiments, the enrichment is at least 1,000 fold. In some embodiments, the enrichment is at least 2,000 fold. In some embodiments, the enrichment is at least 4,000 fold. In some embodiments, the enrichment is at least 8,000 fold. In some embodiments, the enrichment is at least 10,000 fold. In some embodiments, the enrichment is at least 20,000 fold. In some embodiments, the enrichment is at least (1.5)ⁿ. In some embodiments, the enrichment is at least (1.6)ⁿ. In some embodiments, the enrichment is at least (1.7)ⁿ. In some embodiments, the enrichment is at least (1.1)ⁿ. In some embodiments, the enrichment is at least (1.8)ⁿ. In some embodiments, the enrichment is at least (1.9)ⁿ. In some embodiments, the enrichment is at least 2ⁿ. In some embodiments, the enrichment is at least 3ⁿ. In some embodiments, the enrichment is at least 4ⁿ. In some embodiments, the enrichment is at least 5ⁿ. In some embodiments, the enrichment is at least 6ⁿ. In some embodiments, the enrichment is at least 7ⁿ. In some embodiments, the enrichment is at least 8ⁿ. In some embodiments, the enrichment is at least 9ⁿ. In some embodiments, the enrichment is at least 10ⁿ. In some embodiments, the enrichment is at least 15ⁿ. In some embodiments, the enrichment is at least 20ⁿ. In some embodiments, the enrichment is at least 25ⁿ. In some embodiments, the enrichment is at least 30ⁿ. In some embodiments, the enrichment is at least 40ⁿ. In some embodiments, the enrichment is at least 50ⁿ. In some embodiments, the enrichment is at least 100ⁿ. In some embodiments, enrichment is measured by increase of the fraction of oligonucleotides of the particular oligonucleotide type in oligonucleotides that have the base sequence, the pattern of backbone linkages, and the pattern of backbone phosphorus modifications of the particular oligonucleotide type. In some embodiments, an enrichment is measured by decrease of the fraction of oligonucleotides that have the base sequence, the pattern of backbone linkages, and the pattern of backbone phosphorus modifications of the particular oligonucleotide type but are not of the particular oligonucleotide type in oligonucleotides that have the base sequence, the pattern of backbone linkages, and the pattern of backbone phosphorus modifications of the particular oligonucleotide type.

[0059] In some embodiments, a composition further comprises a targeting component. A targeting component can be either conjugated or not conjugated to a lipid or a biologically active agent. In some embodiments, a targeting component is conjugated to a biologically active agent. In some embodiments, a biologically active agent is conjugated to both a lipid and a targeting component. Various targeting components can be used in accordance with the present disclosure, e.g., lipids, antibodies, peptides, carbohydrates, etc.

[0060] In some embodiments, the present disclosure encompasses the use of a composition comprising a lipid and a biologically active agent. In some embodiments, the present disclosure provides methods for delivering a biologically active agent to a target location comprising administering a provided composition. In some embodiments, a provided method delivers a biologically active agent into a cell. In some embodiments, a provided method delivers a biologically active agent into a muscle cell. In some embodiments, a provided method delivers a biologically active agent into a cell within a tissue. In some embodiments, a provided method delivers a biologically active agent into a cell within an organ. In some embodiments, a provided method delivers a biologically active agent into a cell within a subject, comprising administering to the subject a provided composition. In some embodiments, a provided method delivers a biologically active agent into cytoplasm. In some embodiments, a provided method delivers a biologically active agent into nucleus.

[0061] In some embodiments, the present disclosure pertains to methods related to the delivery of a biologically active agent to a muscle cell or tissue, or a muscle cell or tissue in a mammal (e.g., a human subject), which method pertains to a use of a composition comprising a biologically active agent and a lipid and any one or more additional components selected from: a polynucleotide, a dye, an intercalating agent (e.g. an acridine), carbonic anhydrase inhibitor, a cross-linker (e.g. psoralene, or mitomycin C), a porphyrin (e.g., TPPC4, texaphyrin, or Sapphyrin), a polycyclic aromatic hydrocarbon (e.g., phenazine, or dihydrophenazine), an artificial endonuclease, a chelating agent, EDTA, an alkylating agent, a phosphate, an amino, a mercapto, a PEG (e.g., PEG-40K), MPEG, [MPEG]₂, a polyamino, an alkyl, a substituted alkyl, a radiolabeled marker, an enzyme, a hapten (e.g. biotin), a transport/absorption facilitator (e.g., aspirin, vitamin E, or folic acid), a synthetic ribonuclease, a protein, e.g., a glycoprotein, or peptide, e.g., a molecule having a specific affinity for a co-ligand, or antibody e.g., an antibody, a hormone, a hormone receptor, a non-peptidic species, a lipid, a lectin, a carbohydrate, a vitamin, a cofactor, or a drug. In some embodiments, the present disclosure pertains to compositions or methods related to a composition comprising a biologically active agent and a lipid comprising a C₁₀-C₈₀ linear, saturated or partially unsaturated, aliphatic chain. In some embodiments, the present disclosure pertains to compositions or methods related to a composition comprising a biologically active agent and a lipid comprising a C₁₀-C₈₀ linear, saturated or partially unsaturated, aliphatic chain, optionally substituted with one or more C₁₋₄ aliphatic group. In some embodiments, the present disclosure pertains to compositions or methods related to a composition comprising a biologically active agent and a lipid comprising a C₁₀-C₆₀ linear, saturated or partially unsaturated, aliphatic chain. In some embodiments, the present disclosure pertains to compositions or methods related to a composition comprising a biologically active agent and a lipid comprising a C₁₀-C₆₀ linear, saturated or partially unsaturated, aliphatic chain, optionally substituted with one or more C₁₋₄ aliphatic group. In some embodiments, the present disclosure pertains to compositions or methods related to a composition comprising a biologically active agent and a lipid comprising a C₁₀-C₄₀ linear, saturated or partially unsaturated, aliphatic chain. In some embodiments, the present disclosure pertains to compositions or methods related to a composition comprising a biologically active agent and a lipid comprising a C₁₀-C₄₀ linear, saturated or partially unsaturated, aliphatic chain, optionally substituted with one or more C₁₋₄ aliphatic group. In some embodiments, the present disclosure provides chirally controlled oligonucleotide compositions and a lipid selected from the group consisting of: lauric acid, myristic acid, palmitic acid, stearic acid, oleic acid, linoleic acid, alpha-linolenic acid, gamma-linolenic acid, docosahexaenoic acid (cis-DHA), turbinaric acid and dilinoleyl, wherein the composition is suitable for delivery of the oligonucleotide to a muscle cell or tissue, or a muscle cell or tissue in a mammal (e.g., a human subject). In some embodiments, a biologically active agent is an oligonucleotide comprising one or more chiral internucleotidic linkages, and a provided composition is a chirally controlled oligonucleotide composition of the oligonucleotide. In some embodiments, a biologically active agent is an oligonucleotide comprising one or more chiral internucleotidic linkages, and a provided composition is a non-chirally controlled oligonucleotide composition of the oligonucleotide.

[0062] In some embodiments, the present disclosure pertains to a method of delivering a biologically active agent to a cell or tissue, wherein the method comprises steps of: providing a composition comprising a biologically active agent and a lipid; and contacting the cell or tissue with the composition; in some embodiments, the present disclosure pertains to a method of administering a biologically active agent to a subject, wherein the method comprises steps of: providing a composition comprising a biologically active agent and a lipid; and administering the composition to the subject. In some embodiments, a lipid comprises a C₁₀-C₈₀ linear, saturated or partially unsaturated, aliphatic chain. In some embodiments, a lipid comprises a C₁₀-C₈₀ linear, saturated or partially unsaturated, aliphatic chain, optionally substituted with one or more C₁₋₄ aliphatic group. In some embodiments, a lipid comprises a C₁₀-C₆₀ linear, saturated or partially unsaturated, aliphatic chain. In some embodiments, a lipid comprises a C₁₀-C₆₀ linear, saturated or partially unsaturated, aliphatic chain, optionally substituted with one or more C₁₋₄ aliphatic group. In some embodiments, a lipid comprises a C₁₀-C₄₀ linear, saturated or partially unsaturated, aliphatic chain. In some embodiments, a lipid comprises a C₁₀-C₄₀ linear, saturated or partially unsaturated, aliphatic chain, optionally substituted with one or more C₁₋₄ aliphatic group. In various embodiments, the lipid is selected from the group consisting of: lauric acid, myristic acid, palmitic acid, stearic acid, oleic acid, linoleic acid, alpha-linolenic acid, gamma-linolenic acid, docosahexaenoic acid (cis-DHA), turbinaric acid and dilinoleyl. In some embodiments, a biologically active agent is selected from the group consisting of: a small molecule, a peptide, a protein, a component of a CRISPR-Cas system, a carbohydrate, a therapeutic agent, a chemotherapeutic agent, a vaccine, a nucleic acid, and a lipid. In some embodiments, a nucleic acid is an oligonucleotide, an antisense oligonucleotide, an RNAi agent, a miRNA, immunomodulatory nucleic acid, an aptamer, a Piwi-interacting RNA (piRNA), a small nucleolar RNA (snoRNA), a ribozyme, a mRNA, a lncRNA, a ncRNA, an antigomir (e.g., an antagonist to a miRNA, lncRNA, ncRNA or other nucleic acid), a plasmid, a vector, or a portion thereof. In some embodiments, a provided composition is a chirally controlled oligonucleotide composition of a nucleic acid which comprises one or more chiral internucleotidic linkages. In various embodiments, the extra-hepatic cell or tissue is a muscle cell or tissue. In various embodiments, a muscle cell or tissue is in a subject. In various embodiments, a muscle cell or tissue is in a subject suffering from a muscle-related disease or disorder. In various embodiments, a muscle-related disorder is sarcopenia, a muscle movement disorder, a muscle wasting-related disorder, muscle degeneration, muscle weakness, muscular dystrophy, Duchenne muscular dystrophy, heart failure, breathing disorder, skeletal muscle degeneration caused by malnutrition and disease, a muscle-related disease related to impaired insulin-dependent signaling, amyotrophic lateral sclerosis, spinal muscle atrophy and spinal cord injury, ischemic muscle disease. In some embodiments, the present disclosure pertains to a method of administering a nucleic acid (as a non-limiting example, an oligonucleotide or a stereodefined oligonucleotide) to a muscle cell or tissue in a subject, wherein the subject is afflicted with a muscle-related disease or disorder, wherein the method comprises steps of: providing a composition comprising a lipid and the nucleic acid, and administering a therapeutically effective amount of the composition to the subject.

[0063] In some embodiments, a biologically active agent is an oligonucleotide, whose sequence is or comprises an element that is substantially complementary to a targeted element in a cellular nucleic acid. In some embodiments, a targeted element is or comprises a sequence element that is associated with a muscle disease, disorder or condition. In some embodiments, a muscle disease, disorder or condition is DMD. In some embodiments, a cellular nucleic acid is or comprises a transcript. In some embodiments, a cellular nucleic acid is or comprises a primary transcript. In some embodiments, a cellular nucleic acid is or comprises a genomic nucleic acid.

[0064] In some embodiments, the present disclosure provides a composition comprising a lipid and a biologically active agent.

[0065] In some embodiments, the present disclosure provides a composition comprising a lipid and a biologically active agent, characterized in that the composition delivers the biologically active agent into cells.

[0066] In some embodiments, a composition delivers the biologically active agent into the cytoplasm of the cells.

[0067] In some embodiments, a composition delivers the biologically active agent into the nucleus of the cells.

[0068] In some embodiments, the present disclosure provides a composition comprising a lipid and a biologically active agent, wherein the composition delivers the biologically active agent into cells to a level higher than that observed for the biologically active agent absent the lipid.

[0069] In some embodiments, the present disclosure provides a composition comprising a lipid and a biologically active agent, wherein the composition is characterized in that it delivers the biologically active agent into muscle cells.

[0070] In some embodiments, a composition delivers the biologically active agent into the cytoplasm of the muscle cells.

[0071] In some embodiments, a composition delivers the biologically active agent into the nucleus of the muscle cells.

[0072] In some embodiments, a composition is characterized in that when administered to a subject, the composition delivers the biologically active agent to a muscle cell in the subject.

[0073] In some embodiments, a composition delivers the biologically active agent into the cytoplasm of the muscle cells.

[0074] In some embodiments, a composition delivers the biologically active agent into the nucleus of the muscle cells.

[0075] In some embodiments, the present disclosure provides a composition for delivery of a biologically active agent to a muscle cell or tissue, comprising a lipid and the biologically active agent.

[0076] In some embodiments, the present disclosure provides a composition comprising a biologically active agent and a lipid selected from the list of: lauric acid, myristic acid, palmitic acid, stearic acid, oleic acid, linoleic acid, alpha-linolenic acid, gamma-linolenic acid, docosahexaenoic acid (cis-DHA), turbinaric acid and dilinoleyl.

[0077] In some embodiments, the present disclosure provides a composition comprising a biologically active agent and a lipid selected from:

[chemical structure]

[0078] In some embodiments, the present disclosure provides a composition comprising a biologically active agent and a lipid,

[0079] wherein the lipid comprises a C₁₀-C₄₀ linear, saturated or partially unsaturated, aliphatic chain, optionally substituted with one or more C₁₋₄ aliphatic group, wherein the biologically active agent is selected from the group consisting of: a small molecule, a peptide, a protein, a component of a CRISPR-Cas system, a carbohydrate, a therapeutic agent, a chemotherapeutic agent, a vaccine, a nucleic acid, and a lipid.

[0080] In some embodiments, the present disclosure provides a composition comprising a nucleic acid and a lipid, for delivery of the lipid to a muscle cell or tissue.

[0081] In some embodiments, the present disclosure provides an oligonucleotide composition comprising a plurality of oligonucleotides, which share:
[0082] 1) a common base sequence;
[0083] 2) a common pattern of backbone linkages; and
[0084] 3) a common pattern of backbone phosphorus modifications;
   wherein one or more oligonucleotides of the plurality are individually conjugated to a lipid.

[0085] In some embodiments, the present disclosure provides a chirally controlled oligonucleotide composition comprising a plurality of oligonucleotides, which share:
[0086] 1) a common base sequence;
[0087] 2) a common pattern of backbone linkages; and
[0088] 3) a common pattern of backbone phosphorus modifications;
   wherein:
[0089] the composition is chirally controlled in that the plurality of oligonucleotides share the same stereochemistry at one or more chiral internucleotidic linkages;
[0090] one or more oligonucleotides of the plurality are individually conjugated to a lipid; and
[0091] one or more oligonucleotides of the plurality are optionally and individually conjugated to a targeting compound or moiety.

[0092] In some embodiments, an oligonucleotide comprises a sequence which is substantially complementary to that of a targeted element in a nucleic acid in a cell.

[0093] In some embodiments, an oligonucleotide comprises a sequence which is substantially complementary to that of a targeted element in a nucleic acid in a cell in a subject.

[0094] In some embodiments, an oligonucleotide comprises a sequence which is substantially complementary to that of a targeted element in a nucleic acid in a cell, wherein the nucleic acid is genomic.

[0095] In some embodiments, an oligonucleotide comprises a sequence which is substantially complementary to that of a targeted element in a nucleic acid in a cell in a subject, wherein the nucleic acid is genomic.

[0096] In some embodiments, an oligonucleotide comprises a sequence which is substantially complementary to that of a targeted element in a nucleic acid in a cell, wherein the targeted element is a mRNA or a portion thereof.

[0097] In some embodiments, an oligonucleotide comprises a sequence which is substantially complementary to that of a targeted element in a nucleic acid in a cell in a subject, wherein the targeted element is a mRNA or a portion thereof.

[0098] In some embodiments, an oligonucleotide comprises a sequence which is substantially complementary to that of a targeted element in a nucleic acid in a cell, wherein the targeted element is associated with a disease or disorder.

[0099] In some embodiments, an oligonucleotide comprises a sequence which is substantially complementary to that of a targeted element in a nucleic acid in a cell in a subject, wherein the targeted element is associated with a disease or disorder.

[0100] In some embodiments, an oligonucleotide comprises a sequence which is substantially complementary to that of a targeted element in a nucleic acid in a muscle cell, wherein the targeted element is associated with a muscle-related disease or disorder.

[0101] In some embodiments, an oligonucleotide comprises a sequence which is substantially complementary to that of a targeted element in a nucleic acid in a muscle cell in a subject, wherein the targeted element is associated with a muscle-related disease or disorder.

[0102] In some embodiments, a plurality of oligonucleotides share the same stereochemistry at five or more chiral internucleotidic linkages.

[0103] In some embodiments, a plurality of oligonucleotides share the same stereochemistry at ten or more chiral internucleotidic linkages.

[0104] In some embodiments, a plurality of oligonucleotides share the same stereochemistry at each of the chiral internucleotidic linkages so that they share a common pattern of backbone chiral centers.

[0105] In some embodiments, one or more oligonucleotides of the plurality are independently conjugated to a lipid through a 5′-OH on the oligonucleotide.

[0106] In some embodiments, one or more oligonucleotides of the plurality are independently conjugated to a lipid through a 3′-OH on the oligonucleotide.

[0107] In some embodiments, each oligonucleotide of the plurality is individually conjugated to a lipid.

[0108] In some embodiments, each oligonucleotide of the plurality is individually conjugated to the same lipid.

[0109] In some embodiments, the present disclosure provides a composition comprising a biologically active agent and a lipid, wherein the agent is any agent disclosed herein, and wherein the lipid is any lipid disclosed herein.

[0110] In some embodiments, the present disclosure provides a method of delivering an oligonucleotide to a muscle cell or tissue in a human subject, comprising:

(a) Providing a composition or method of any one embodiment; and
(b) Administering the composition to the human subject such that the oligonucleotide is delivered to a muscle cell or tissue in the subject.

[0111] In some embodiments, the present disclosure provides a method for delivering a biologically active agent to a muscle cell or tissue comprising preparing a composition according to any one of the embodiments and treating [contacting] the cell or tissue with the composition.

[0112] In some embodiments, the present disclosure provides a method of modulating the level of a transcript or gene product of a gene in a cell, the method comprising the step of contacting the cell with a composition according to any one of the embodiments, wherein the biologically active agent is capable of modulating the level of the transcript or gene product.

[0113] In some embodiments, the present disclosure provides a method for inhibiting expression of a gene in a muscle cell or tissue comprising preparing a composition according to any one of the embodiments and treating the muscle cell or tissue with the composition.

[0114] In some embodiments, the present disclosure provides a method for inhibiting expression of a gene in a muscle cell or tissue in a mammal comprising preparing a composition according to any one of the embodiments and administering the composition to the mammal.

[0115] In some embodiments, the present disclosure provides a method of treating a disease that is caused by the over-expression of one or several proteins in a muscle cell or tissue in a subject, said method comprising the administration of a composition according to any one of the embodiments to the subject.

[0116] In some embodiments, the present disclosure provides a method of treating a disease that is caused by a reduced, suppressed or missing expression of one or several proteins in a subject, said method comprising the administration of a composition according to any one of the embodiments to the subject.

[0117] In some embodiments, the present disclosure provides a method for generating an immune response in a subject, said method comprising the administration of a composition according to any one of the embodiments to the subject, wherein the biologically active compound is an immunomodulating nucleic acid.

[0118] In some embodiments, the present disclosure provides a method for treating a sign and/or symptom of a disease, disorder, or condition in a subject selected from cancer, a proliferative disease, disorder, or condition, a metabolic disease, disorder, or condition, an inflammatory disease, disorder, or condition, and a viral infection by providing a composition or method of any one of the embodiments and administering the composition to the subject.

[0119] In some embodiments, the present disclosure provides a method of modulating the amount of exon skipping in a cell, the method comprising the step of contacting the cell with a composition according to any one of the embodiments, wherein the biologically active agent is capable of modulating the amount of exon skipping.

[0120] In some embodiments, the present disclosure provides a method of administering a biologically active agent to a subject in need thereof, comprising steps of providing a composition comprising the agent a lipid, and administering the composition to the subject, wherein the agent is any agent disclosed herein, and wherein the lipid is any lipid disclosed herein.

[0121] In some embodiments, the present disclosure provides a method of treating a disease in a subject, the method comprising steps of providing a composition comprising the agent a lipid, and administering a therapeutically effective amount of the composition to the subject, wherein the agent is any agent disclosed herein, and wherein the lipid is any lipid disclosed herein, and wherein the disease is any disease disclosed herein.

[0122] In some embodiments, a lipid comprises an optionally substituted C₁₀-C₄₀ saturated or partially unsaturated aliphatic chain.

[0123] In some embodiments, a lipid comprises an optionally substituted C₁₀-C₄₀ linear, saturated or partially unsaturated, aliphatic chain.

[0124] In some embodiments, a lipid comprises a C₁₀-C₄₀ linear, saturated or partially unsaturated, aliphatic chain, optionally substituted with one or more C₁₋₄ aliphatic group.

[0125] In some embodiments, a lipid comprises an unsubstituted C₁₀-C₄₀ linear, saturated or partially unsaturated, aliphatic chain.

[0126] In some embodiments, a lipid comprises no more than one optionally substituted C₁₀-C₄₀ linear, saturated or partially unsaturated, aliphatic chain.

[0127] In some embodiments, a lipid comprises two or more optionally substituted C₁₀-C₄₀ linear, saturated or partially unsaturated, aliphatic chain.

[0128] In some embodiments, a lipid comprises no tricyclic or polycyclic moiety.

[0129] In some embodiments, a lipid has the structure of R¹—COOH, wherein R¹ is an optionally substituted C₁₀-C₄₀ saturated or partially unsaturated aliphatic chain.

[0130] In some embodiments, a lipid is conjugated through its carboxyl group.

[0131] In some embodiments, a lipid is selected from:

[chemical structure]

[0132] In some embodiments, a lipid is conjugated to the biologically active agent.

[0133] In some embodiments, a lipid is directly conjugated to the biologically active agent.

[0134] In some embodiments, a lipid is conjugated to the biologically active agent via a linker.

[0135] In some embodiments, a linker is selected from: an uncharged linker; a charged linker; a linker comprising an alkyl; a linker comprising a phosphate; a branched linker; an unbranched linker; a linker comprising at least one cleavage group; a linker comprising at least one redox cleavage group; a linker comprising at least one phosphate-based cleavage group; a linker comprising at least one acid-cleavage group; a linker comprising at least one ester-based cleavage group; and a linker comprising at least one peptide-based cleavage group.

[0136] In some embodiments, a nucleic acid is an oligonucleotide, an antisense oligonucleotide, an RNAi agent, a miRNA, splice switching oligonucleotide (SSO), immunomodulatory nucleic acid, an aptamer, a ribozyme, a mRNA, a lncRNA, a ncRNA, an antigomir (e.g., an antagonist to a miRNA, lncRNA, ncRNA or other nucleic acid), a plasmid, a vector, or a portion thereof.

[0137] In some embodiments, a RNAi agent is a siRNA, a shRNA, a miRNA, a sisiRNA, a meroduplex RNA (mdRNA), a DNA-RNA chimera, a siRNA comprising two mismatches (or more mismatches), a neutral siRNA, an aiRNA, or a siRNA comprising a terminal or internal spacer.

[0138] In some embodiments, each oligonucleotide of the plurality is individually conjugated to the same lipid at the same location.

[0139] In some embodiments, a lipid is conjugated to an oligonucleotide through a linker.

[0140] In some embodiments, one or more oligonucleotides of the plurality are independently conjugated to a targeting compound or moiety.

[0141] In some embodiments, one or more oligonucleotides of the plurality are independently conjugated to a lipid and a targeting compound or moiety.

[0142] In some embodiments, one or more oligonucleotides of the plurality are independently conjugated to a lipid at one end and a targeting compound or moiety at the other.

[0143] In some embodiments, oligonucleotides of the plurality share the same chemical modification patterns.

[0144] In some embodiments, oligonucleotides of the plurality share the same chemical modification patterns comprising one or more base modifications.

[0145] In some embodiments, oligonucleotides of the plurality share the same chemical modification patterns comprising one or more sugar modifications.

[0146] In some embodiments, a common base sequence is capable of hybridizing with a transcript in a muscle cell, which transcript contains a mutation that is linked to a muscle disease, or whose level, activity and/or distribution is linked to a muscle disease.

[0147] In some embodiments, a common base sequence is capable of hybridizing with a transcript in a muscle cell, and the composition is characterized in that when it is contacted with the transcript in a transcript splicing system, splicing of the transcript is altered relative to that observed under reference conditions selected from the group consisting of absence of the composition, presence of a reference composition, and combinations thereof.

[0148] In some embodiments, a common base sequence hybridizes with a transcript of dystrophin, myostatin, Huntingtin, a myostatin receptor, ActRIIB, ActRIIA, DMPK, Malat1, SMN2, dystrophia myotonica protein kinase (DMPK), Proprotein convertase subtilisin/kexin type 9 (PCSK9), SMAD7 or KRT14 (Keratin 14).

[0149] In some embodiments, a common base sequence hybridizes with a transcript of dystrophin.

[0150] In some embodiments, a common base sequence hybridizes with a transcript of dystrophin, and the composition increases the production of one or more functional or partially functional proteins encoded by dystrophin.

[0151] In some embodiments, an oligonucleotide or oligonucleotides is or are splice switching oligonucleotide or oligonucleotides.

[0152] In some embodiments, a plurality of oligonucleotides share a common pattern of sugar modification, which comprises 3 or more 2′-F.

[0153] In some embodiments, a plurality of oligonucleotides share a common pattern of sugar modification, which comprises 3 or more consecutive 2′-F.

[0154] In some embodiments, a plurality of oligonucleotides share a common pattern of sugar modification, which comprises 3 or more consecutive 2′-F within the 10 nucleotide at the 5′-end.

[0155] In some embodiments, a plurality of oligonucleotides share a common pattern of sugar modification, which comprises 3 or more 2′-F within the 10 nucleotide at the 5′-end.

[0156] In some embodiments, a plurality of oligonucleotides share a common pattern of sugar modification, which comprises 3 or more consecutive 2′-F at the 5′-end.

[0157] In some embodiments, a plurality of oligonucleotides share a common pattern of sugar modification, which comprises 5 or more consecutive 2′-F within the first 10 nucleotide at the 3′-end.

[0158] In some embodiments, a plurality of oligonucleotides share a common pattern of sugar modification, which comprises 5 or more 2′-F within the 10 nucleotide at the 3′-end.

[0159] In some embodiments, a plurality of oligonucleotides share a common pattern of sugar modification, which comprises 7 or more consecutive 2′-F at the 3′-end.

[0160] In some embodiments, a plurality of oligonucleotides share a common pattern of sugar modification, which comprises 3 or more consecutive 2′-F at the 5′-end, 3 or more consecutive 2′-F at the 3′-end, and 3 or more 2′-OR between the 5′-end 2′-F and the 3′-end 2′-F modifications.

[0161] In some embodiments, a plurality of oligonucleotides share a common pattern of sugar modification, which comprises 3 or more 2′-F at the 5′-end, 3 or more 2′-F at the 3′-end, and 3 or more 2′-OR between the 5′-end 2′-F and the 3′-end 2′-F modifications.

[0162] In some embodiments, a plurality of oligonucleotides share a common pattern of sugar modification, which comprises 5 or more 2′-F within the 10 nucleotides at the 5′-end.

[0163] In some embodiments, a plurality of oligonucleotides share a common pattern of sugar modification, which comprises 3 or more consecutive 2′-F at the 5′-end.

[0164] In some embodiments, a plurality of oligonucleotides share a common pattern of sugar modification, which comprises 7 or more 2′-F within the 10 nucleotides at the 3′-end.

[0165] In some embodiments, a plurality of oligonucleotides share a common pattern of sugar modification, which comprises 5 or more consecutive 2′-F within the 10 nucleotides at the 3′-end.

[0166] In some embodiments, a plurality of oligonucleotides share a common pattern of sugar modification, which comprises 7 or more consecutive 2′-F at the 3′-end.

[0167] In some embodiments, a plurality of oligonucleotides comprises a 5′-wing-core-wing-3′ structure, wherein each wing region independently comprises 3 to 10 nucleosides, and the core region independently comprises 3 to 10 nucleosides.

[0168] In some embodiments, a core comprises at least one internucleotidic linkage which is chirally controlled (e.g., a phosphorothioate in Sp or Rp configuration) and at least one internucleotidic linkage which is not chiral (e.g., a phosphodiester or phosphorodithioate). In some embodiments, a core comprises at least one internucleotidic linkage which is chirally controlled phosphorothioate in Sp configuration and at least one internucleotidic linkage which is not chiral (e.g., a phosphodiester or phosphorodithioate). In some embodiments, each wing region comprises no modified sugar moieties. In some embodiments, a core region comprises one or more natural phosphate linkages. In some embodiments, each internucleotidic linkage following a core nucleoside is a natural phosphate linkage. In some embodiments, a wing comprises at least one internucleotidic linkage which is chirally controlled (e.g., a phosphorothioate in Sp or Rp configuration) and at least one internucleotidic linkage which is not chiral (e.g., a phosphodiester or phosphorodithioate). In some embodiments, a wing comprises at least one internucleotidic linkage which is chirally controlled phosphorothioate in Sp configuration and at least one internucleotidic linkage which is not chiral (e.g., a phosphodiester or phosphorodithioate). In some embodiments, a wing comprises one or more modified internucleotidic linkages. In some embodiments, each internucleotidic linkage following a core nucleoside is a modified internucleotidic linkage.

[0169] In some embodiments, a 5′-wing region comprises 3 or more 2′-F.

[0170] In some embodiments, a 5′-wing region comprises 3 or more consecutive 2′-F.

[0171] In some embodiments, a 5′-wing region comprises 10% or more 2′-F.

[0172] In some embodiments, each sugar of a 5′-wing region comprises a 2′-F.

[0173] In some embodiments, a 5′-wing region comprises 3 or more chiral internucleotidic linkages.

[0174] In some embodiments, a 5′-wing region comprises 3 or more consecutive internucleotidic linkages.

[0175] In some embodiments, a 5′-wing region comprises 10% or more internucleotidic linkages.

[0176] In some embodiments, each internucleotidic linkage of a 5′-wing region is chiral.

[0177] In some embodiments, each internucleotidic linkage of a 5′-wing region is a phosphorothioate linkage.

[0178] In some embodiments, a 5′-wing region comprises 5 or more Rp chiral internucleotidic linkages.

[0179] In some embodiments, a 5′-wing region comprises 5 or more Rp consecutive internucleotidic linkages.

[0180] In some embodiments, a 5′-wing region comprises 10% or more Rp internucleotidic linkages.

[0181] In some embodiments, each internucleotidic linkage of a 5′-wing region is Rp.

[0182] In some embodiments, a 3′-wing region comprises 3 or more 2′-F.

[0183] In some embodiments, a 3′-wing region comprises 5 or more consecutive 2′-F.

[0184] In some embodiments, a 3′-wing region comprises 10% or more 2′-F.

[0185] In some embodiments, each sugar of a 3′-wing region comprises a 2′-F.

[0186] In some embodiments, a 3′-wing region comprises 3 or more chiral internucleotidic linkages.

[0187] In some embodiments, a 3′-wing region comprises 5 or more consecutive internucleotidic linkages.

[0188] In some embodiments, a 3′-wing region comprises 10% or more internucleotidic linkages.

[0189] In some embodiments, each internucleotidic linkage of a 3′-wing region is chiral.

[0190] In some embodiments, each internucleotidic linkage of a 3′-wing region is a phosphorothioate linkage.

[0191] In some embodiments, a 3′-wing region comprises 3 or more Rp chiral internucleotidic linkages.

[0192] In some embodiments, a 3′-wing region comprises 5 or more Rp consecutive internucleotidic linkages.

[0193] In some embodiments, a 3′-wing region comprises 10% or more Rp internucleotidic linkages.

[0194] In some embodiments, each internucleotidic linkage of a 3′-wing region is Rp.

[0195] In some embodiments, a 5′-wing and the 3′-wing have the same length, pattern of chemical modifications, pattern of backbone internucleotidic linkages, and pattern of backbone chiral centers.

[0196] In some embodiments, an internucleotidic linkage between the 5′-wing region and the core region is a chiral internucleotidic linkage.

[0197] In some embodiments, an internucleotidic linkage between the 5′-wing region and the core region is a phosphorothioate linkage.

[0198] In some embodiments, an internucleotidic linkage between the 5′-wing region and the core region is an Rp phosphorothioate linkage.

[0199] In some embodiments, an internucleotidic linkage between the 3′-wing region and the core region is a chiral internucleotidic linkage.

[0200] In some embodiments, an internucleotidic linkage between the 3′-wing region and the core region is a phosphorothioate linkage.

[0201] In some embodiments, an internucleotidic linkage between the 3′-wing region and the core region is an Rp phosphorothioate linkage.

[0202] In some embodiments, a core region comprises 3 or more 2′-OR.

[0203] In some embodiments, a core region comprises 5 or more consecutive 2′-OR.

[0204] In some embodiments, a core region comprises 10% or more 2′-OR.

[0205] In some embodiments, each sugar of a core region comprises a 2′-OR.

[0206] In some embodiments, a core region comprises 3 or more chiral internucleotidic linkages.

[0207] In some embodiments, a core region comprises 5 or more consecutive internucleotidic linkages.

[0208] In some embodiments, a core region comprises 10% or more internucleotidic linkages.

[0209] In some embodiments, each internucleotidic linkage of a core region is chiral.

[0210] In some embodiments, each internucleotidic linkage of a core region is a phosphorothioate linkage.

[0211] In some embodiments, a core region comprises 3 or more Sp chiral internucleotidic linkages.

[0212] In some embodiments, a core region comprises 5 or more Sp consecutive internucleotidic linkages.

[0213] In some embodiments, a core region comprises 10% or more Sp internucleotidic linkages.

[0214] In some embodiments, each internucleotidic linkage of a core region is Sp.

[0215] In some embodiments, a 5′-wing region comprises 5 or more Sp chiral internucleotidic linkages.

[0216] In some embodiments, a 5′-wing region comprises 5 or more Sp consecutive internucleotidic linkages.

[0217] In some embodiments, a 5′-wing region comprises 10% or more Sp internucleotidic linkages.

[0218] In some embodiments, each internucleotidic linkage of a 5′-wing region is Sp.

[0219] In some embodiments, a 3′-wing region comprises 3 or more Sp chiral internucleotidic linkages.

[0220] In some embodiments, a 3′-wing region comprises 5 or more Sp consecutive internucleotidic linkages.

[0221] In some embodiments, a 3′-wing region comprises 10% or more Sp internucleotidic linkages.

[0222] In some embodiments, each internucleotidic linkage of a 3′-wing region is Sp.

[0223] In some embodiments, an internucleotidic linkage between the 5′-wing region and the core region is an Sp phosphorothioate linkage.

[0224] In some embodiments, an internucleotidic linkage between the 3′-wing region and the core region is an Sp phosphorothioate linkage.

[0225] In some embodiments, a nucleic acid is a splice switching oligonucleotide (SSO).

[0226] In some embodiments, a nucleic acid is a splice switching oligonucleotide (SSO) which targets dystrophin.

[0227] In some embodiments, a nucleic acid is a splice switching oligonucleotide (SSO) which targets dystrophin exon 51, 45, 53 or 44.

[0228] In some embodiments, a nucleic acid is a splice switching oligonucleotide (SSO) which targets dystrophin exon 51.

[0229] In some embodiments, an immunomodulatory nucleic acid is a CpG oligonucleotide.

[0230] In some embodiments, an immunomodulatory nucleic acid is a CpG oligonucleotide which is capable of agonizing an immune response which is TLR9-mediated or TLR9-associated.

[0231] In some embodiments, an immunomodulatory nucleic acid is a CpG oligonucleotide which is capable of antagonizing an immune response which is TLR9-mediated or TLR9-associated.

[0232] In some embodiments, an oligonucleotide comprises a strand of about 14 to about 49 nucleotides.

[0233] Where the oligonucleotide further comprises a second strand.

[0234] In some embodiments, an oligonucleotide comprises at least one modification to a base, sugar or internucleoside linkage.

[0235] In some embodiments, a modification is a sugar modifications at the 2′ carbon.

[0236] In some embodiments, a modification is a sugar modifications at the 2′ carbon selected from: 2′-MOE, 2′-OMe, and 2′-F.

[0237] In some embodiments, a biologically active agent is a nucleic acid.

[0238] In some embodiments, a biologically active agent is an immunomodulatory nucleic acid.

[0239] In some embodiments, a biologically active agent is a CpG oligonucleotide that agonizes or antagonizes an immune response

[0240] In some embodiments, a biologically active agent is an CpG oligonucleotide that agonizes or antagonizes an immune response which is TLR9-mediated or TLR9-associated.

[0241] In some embodiments, a biologically active agent is a small molecule, and wherein the small molecule is hydrophobic

[0242] In some embodiments, a biologically active agent is a hydrophobic small molecule selected from the group consisting of a sterol and a hydrophobic vitamin.

[0243] In some embodiments, a biologically active agent is cholesterol.

[0244] In some embodiments, a biologically active agent is a protein selected from the group consisting of a nucleoprotein, a mucoprotein, a lipoprotein, a synthetic polypeptide, a small molecule linked to a protein and a glycoprotein.

[0245] In some embodiments, a biologically active agent is a nucleic acid in the form of a single stranded or partially double stranded oligomer or a polymer composed of ribonucleotides.

[0246] In some embodiments, a biologically active agent is a nucleic acid selected from the group consisting of miRNA, antisense oligonucleotides, siRNA, immune-stimulatory oligonucleotides, aptamers, Piwi-interacting RNAs (piRNAs), small nucleolar RNAs (snoRNAs), ribozymes, and plasmids encoding a specific gene or siRNA.

[0247] In some embodiments, a cell or tissue is a muscle cell or tissue.

[0248] In some embodiments, a biologically active agent is a nucleic acid.

[0249] In some embodiments, a biologically active agent is an oligonucleotide.

[0250] In some embodiments, a biologically active agent is an oligonucleotide which mediates exon skipping.

[0251] In some embodiments, a biologically active agent is a stereodefined oligonucleotide which mediates exon skipping.

[0252] In some embodiments, a disease or disorder is a muscle-related disease or disorder.

[0253] In some embodiments, a muscle-related disorder is sarcopenia, a muscle movement disorder, a muscle wasting-related disorder, muscle degeneration, muscle weakness, muscular dystrophy, Duchenne muscular dystrophy, heart failure, breathing disorder, skeletal muscle degeneration caused by malnutrition and disease, a muscle-related disease related to impaired insulin-dependent signaling, amyotrophic lateral sclerosis, spinal muscle atrophy and spinal cord injury, ischemic muscle disease.

[0254] In some embodiments, a cell or tissue is a muscle cell or tissue, wherein the biologically active agent is a stereodefined oligonucleotide which is a splice switching oligonucleotide, and wherein the subject is afflicted with a muscle disorder.

[0255] In some embodiments, a cell or tissue is a muscle cell or tissue, wherein the biologically active agent is a stereodefined oligonucleotide which is a splice switching oligonucleotide, and wherein the subject is afflicted with muscular dystrophy.

[0256] In some embodiments, a cell or tissue is a muscle cell or tissue, wherein the biologically active agent is a stereodefined oligonucleotide which is a splice switching oligonucleotide, and wherein the subject is afflicted with Duchenne muscular dystrophy.

[0257] In some embodiments, a lipid comprises an optionally substituted, C₁₀-C₈₀ saturated or partially unsaturated aliphatic group, wherein one or more methylene units are optionally and independently replaced by an optionally substituted group selected from C₁-C₆ alkylene, C₁-C₆ alkenylene, —C≡C—, a C₁-C₆ heteroaliphatic moiety, —C(R′)₂—, -Cy-, —O—, —S—, —S—S—, —N(R′)—, —C(O)—, —C(S)—, —C(NR′)—, —C(O)N(R′)—, —N(R′)C(O)N(R′)—, —N(R′)C(O)—, —N(R′)C(O)O—, —OC(O)N(R′)—, —S(O)—, —S(O)₂—, —S(O)₂N(R′)—, —N(R′)S(O)₂—, —SC(O)—, —C(O)S—, —OC(O)—, and —C(O)O—, wherein each variable is independently as defined and described herein.

[0258] In some embodiments, a lipid comprises an optionally substituted C₁₀-C₈₀ saturated or partially unsaturated, aliphatic chain.

[0259] In some embodiments, a lipid comprises an optionally substituted C₁₀-C₈₀ linear, saturated or partially unsaturated, aliphatic chain.

[0260] In some embodiments, a lipid comprises an optionally substituted C₁₀-C₆₀ saturated or partially unsaturated, aliphatic chain.

[0261] In some embodiments, a lipid comprises an optionally substituted C₁₀-C₆₀ linear, saturated or partially unsaturated, aliphatic chain.

[0262] In some embodiments, a lipid comprises an optionally substituted C₁₀-C₄₀ saturated or partially unsaturated, aliphatic chain.

[0263] In some embodiments, a lipid comprises an optionally substituted C₁₀-C₄₀ linear, saturated or partially unsaturated, aliphatic chain.

[0264] In some embodiments, a lipid comprises an optionally substituted, C₁₀-C₆₀ saturated or partially unsaturated aliphatic group, wherein one or more methylene units are optionally and independently replaced by an optionally substituted group selected from C₁-C₆ alkylene, C₁-C₆ alkenylene, —C≡C—, a C₁-C₆ heteroaliphatic moiety, —C(R′)₂—, -Cy-, —O—, —S—, —S—S—, —N(R′)—, —C(O)—, —C(S)—, —C(NR′)—, —C(O)N(R′)—, —N(R′)C(O)N(R′)—, —N(R′)C(O)—, —N(R′)C(O)O—, —OC(O)N(R′)—, —S(O)—, —S(O)₂—, —S(O)₂N(R′)—, —N(R′)S(O)₂—, —SC(O)—, —C(O)S—, —OC(O)—, and —C(O)O—, wherein each variable is independently as defined and described herein.

[0265] In some embodiments, a lipid comprises an optionally substituted C₁₀-C₈₀ saturated or partially unsaturated, aliphatic chain.

[0266] In some embodiments, a lipid comprises an optionally substituted C₁₀-C₆₀ linear, saturated or partially unsaturated, aliphatic chain.

[0267] In some embodiments, a lipid comprises an optionally substituted C₁₀-C₄₀ linear, saturated or partially unsaturated, aliphatic chain.

[0268] In some embodiments, a lipid comprises an optionally substituted, C₁₀-C₄₀ saturated or partially unsaturated aliphatic group, wherein one or more methylene units are optionally and independently replaced by an optionally substituted group selected from C₁-C₆ alkylene, C₁-C₆ alkenylene, —C≡C—, a C₁-C₆ heteroaliphatic moiety, —C(R′)₂—, -Cy-, —O—, —S—, —S—S—, —N(R′)—, —C(O)—, —C(S)—, —C(NR′)—, —C(O)N(R′)—, —N(R′)C(O)N(R′)—, —N(R′)C(O)—, —N(R′)C(O)O—, —OC(O)N(R′)—, —S(O)—, —S(O)₂—, —S(O)₂N(R′)—, —N(R′)S(O)₂—, —SC(O)—, —C(O)S—, —OC(O)—, and —C(O)O—, wherein each variable is independently as defined and described herein.

[0269] In some embodiments, a lipid comprises an optionally substituted C₁₀-C₄₀ saturated or partially unsaturated, aliphatic chain.

[0270] In some embodiments, a lipid comprises an optionally substituted C₁₀-C₄₀ linear, saturated or partially unsaturated, aliphatic chain.

[0271] In some embodiments, a composition further comprises one or more additional components selected from: a polynucleotide, carbonic anhydrase inhibitor, a dye, an intercalating agent, an acridine, a cross-linker, psoralene, mitomycin C, a porphyrin, TPPC4, texaphyrin, Sapphyrin, a polycyclic aromatic hydrocarbon phenazine, dihydrophenazine, an artificial endonuclease, a chelating agent, EDTA, an alkylating agent, a phosphate, an amino, a mercapto, a PEG, PEG-40K, MPEG, [MPEG]₂, a polyamino, an alkyl, a substituted alkyl, a radiolabeled marker, an enzyme, a hapten biotin, a transport/absorption facilitator, aspirin, vitamin E, folic acid, a synthetic ribonuclease, a protein, a glycoprotein, a peptide, a molecule having a specific affinity for a co-ligand, an antibody, a hormone, a hormone receptor, a non-peptidic species, a lipid, a lectin, a carbohydrate, a vitamin, a cofactor, or a drug.

[0272] In some embodiments, a lipid comprises a C₁₀-C₈₀ linear, saturated or partially unsaturated, aliphatic chain.

[0273] In some embodiments, a composition further comprises a linker linking the biologically active agent and the lipid, wherein the linker is selected from: an uncharged linker; a charged linker; a linker comprising an alkyl; a linker comprising a phosphate; a branched linker; an unbranched linker; a linker comprising at least one cleavage group; a linker comprising at least one redox cleavage group; a linker comprising at least one phosphate-based cleavage group; a linker comprising at least one acid-cleavage group; a linker comprising at least one ester-based cleavage group; a linker comprising at least one peptide-based cleavage group.

[0274] In some embodiments, a biologically active agent comprises or consists of or is an oligonucleotide or oligonucleotide composition or chirally controlled oligonucleotide composition.

[0275] In some embodiments, a biologically active agent comprises or consists of or is an oligonucleotide or oligonucleotide composition or chirally controlled oligonucleotide composition, wherein the sequence of the oligonucleotide comprises or consists of the sequence of any oligonucleotide described herein.

[0276] In some embodiments, a biologically active agent comprises or consists of or is an oligonucleotide or oligonucleotide composition or chirally controlled oligonucleotide composition, wherein the sequence of the oligonucleotide comprises or consists of the sequence of any oligonucleotide listed in Table 4A.

[0277] In some embodiments, a biologically active agent comprises or consists of or is an oligonucleotide or oligonucleotide composition or chirally controlled oligonucleotide composition, wherein the sequence of the oligonucleotide comprises or consists of the sequence of a splice-switching oligonucleotide.

[0278] In some embodiments, a biologically active agent comprises or consists of or is an oligonucleotide or oligonucleotide composition or chirally controlled oligonucleotide composition, wherein the sequence of the oligonucleotide comprises or consists of the sequence of an oligonucleotide capable of skipping or mediating skipping of an exon in the dystrophin gene.

[0279] In some embodiments, a biologically active agent comprises or consists of or is an oligonucleotide or oligonucleotide composition or chirally controlled oligonucleotide composition, wherein the sequence of the oligonucleotide comprises or consists of the sequence of an oligonucleotide capable of skipping or mediating skipping of exon 51 in the dystrophin gene.

[0280] In some embodiments, a biologically active agent comprises or consists of or is an oligonucleotide or oligonucleotide composition or chirally controlled oligonucleotide composition, wherein the sequence of the oligonucleotide comprises or consists of the sequence of an oligonucleotide capable of skipping or mediating skipping of exon 51, 45, 53 or 44 in the dystrophin gene.

[0281] In some embodiments, a biologically active agent comprises or consists of or is an oligonucleotide or oligonucleotide composition or chirally controlled oligonucleotide composition, wherein the sequence of the oligonucleotide comprises or consists of the sequence of any of: WV-887, WV-896, WV-1709, WV-1710, WV-1714, WV-2095, WV-2100, WV-2106, WV-2107, WV-2108, WV-2109, WV-2223, WV-2224, WV-2225, WV-2226, WV-2227, WV-2228, WV-2229, WV-2230, WV-2438, WV-2444, WV-2445, WV-2526, WV-2527, WV-2528, WV-2529, WV-2530, WV-2531, WV-2533, WV-2578, WV-2580, WV-2587, WV-3047, WV-3152, WV-3472, WV-3473, WV-3507, WV-3508, WV-3509, WV-3510, WV-3511, WV-3512, WV-3513, WV-3514, WV-3515, WV-3545, or WV-3546.

[0282] In some embodiments, a common base sequence is UCAAGGAAGAUGGCAUUUCU (SEQ ID NO: 1). In some embodiments, a common base sequence comprises UCAAGGAAGAUGGCAUUUCU (SEQ ID NO: 1), and the oligonucleotide has a length of up to 30 bases. In some embodiments, a common base sequence comprises UCAAGGAAGAUGGCAUUUCU (SEQ ID NO: 1), and the oligonucleotide has a length of up to 40 bases. In some embodiments, a common base sequence comprises UCAAGGAAGAUGGCAUUUCU (SEQ ID NO: 1), and the oligonucleotide has a length of up to 50 bases. In some embodiments, a common base sequence comprises at least 15 contiguous bases of UCAAGGAAGAUGGCAUUUCU (SEQ ID NO: 1), and the oligonucleotide has a length of up to 30 bases. In some embodiments, a common base sequence comprises at least 15 contiguous bases of UCAAGGAAGAUGGCAUUUCU (SEQ ID NO: 1), and the oligonucleotide has a length of up to 40 bases. In some embodiments, a common base sequence comprises at least 15 contiguous bases of UCAAGGAAGAUGGCAUUUCU (SEQ ID NO: 1), and the oligonucleotide has a length of up to 50 bases. In some embodiments, a common base sequence comprises a sequence having no more than 5 mismatches from the sequence of bases of UCAAGGAAGAUGGCAUUUCU (SEQ ID NO: 1), and the oligonucleotide has a length of up to 30 bases. In some embodiments, a common base sequence comprises a sequence having no more than 5 mismatches from the sequence of bases of UCAAGGAAGAUGGCAUUUCU (SEQ ID NO: 1), and the oligonucleotide has a length of up to 40 bases. In some embodiments, a common base sequence comprises a sequence having no more than 5 mismatches from the sequence of bases of UCAAGGAAGAUGGCAUUUCU (SEQ ID NO: 1), and the oligonucleotide has a length of up to 50 bases.

[0283] In some embodiments, a common base sequence is UCAAGGAAGAUGGCAUUUCU (SEQ ID NO: 1), and a common pattern of backbone chiral centers comprises at least one chirally controlled center. In some embodiments, a common base sequence comprises UCAAGGAAGAUGGCAUUUCU (SEQ ID NO: 1), the oligonucleotide has a length of up to 30 bases, and a common pattern of backbone chiral centers comprises at least one chirally controlled center. In some embodiments, a common base sequence comprises UCAAGGAAGAUGGCAUUUCU (SEQ ID NO: 1), and the oligonucleotide has a length of up to 40 bases, and a common pattern of backbone chiral centers comprises at least one chirally controlled center. In some embodiments, a common base sequence comprises UCAAGGAAGAUGGCAUUUCU (SEQ ID NO: 1), the oligonucleotide has a length of up to 50 bases, and a common pattern of backbone chiral centers comprises at least one chirally controlled center. In some embodiments, a common base sequence comprises at least 15 contiguous bases of UCAAGGAAGAUGGCAUUUCU (SEQ ID NO: 1), the oligonucleotide has a length of up to 30 bases, and a common pattern of backbone chiral centers comprises at least one chirally controlled center. In some embodiments, a common base sequence comprises at least 15 contiguous bases of UCAAGGAAGAUGGCAUUUCU (SEQ ID NO: 1), the oligonucleotide has a length of up to 40 bases, and a common pattern of backbone chiral centers comprises at least one chirally controlled center. In some embodiments, a common base sequence comprises at least 15 contiguous bases of UCAAGGAAGAUGGCAUUUCU (SEQ ID NO: 1), the oligonucleotide has a length of up to 50 bases, and a common pattern of backbone chiral centers comprises at least one chirally controlled center. In some embodiments, a common base sequence comprises a sequence having no more than 5 mismatches from the sequence of bases of UCAAGGAAGAUGGCAUUUCU (SEQ ID NO: 1), the oligonucleotide has a length of up to 30 bases, and a common pattern of backbone chiral centers comprises at least one chirally controlled center. In some embodiments, a common base sequence comprises a sequence having no more than 5 mismatches from the sequence of bases of UCAAGGAAGAUGGCAUUUCU (SEQ ID NO: 1), the oligonucleotide has a length of up to 40 bases, and a common pattern of backbone chiral centers comprises at least one chirally controlled center. In some embodiments, a common base sequence comprises a sequence having no more than 5 mismatches from the sequence of bases of UCAAGGAAGAUGGCAUUUCU (SEQ ID NO: 1), the oligonucleotide has a length of up to 50 bases, and a common pattern of backbone chiral centers comprises at least one chirally controlled center.

[0284] In some embodiments, a common base sequence is UCAAGGAAGAUGGCAUUUCU (SEQ ID NO: 1), and a common pattern of backbone chiral centers comprises at least one chirally controlled center which is a phosphorothioate in the Sp configuration. In some embodiments, a common base sequence comprises UCAAGGAAGAUGGCAUUUCU (SEQ ID NO: 1), the oligonucleotide has a length of up to 30 bases, and a common pattern of backbone chiral centers comprises at least one chirally controlled center which is a phosphorothioate in the Sp configuration. In some embodiments, a common base sequence comprises UCAAGGAAGAUGGCAUUUCU (SEQ ID NO: 1), and the oligonucleotide has a length of up to 40 bases, and a common pattern of backbone chiral centers comprises at least one chirally controlled center which is a phosphorothioate in the Sp configuration. In some embodiments, a common base sequence comprises UCAAGGAAGAUGGCAUUUCU (SEQ ID NO: 1), the oligonucleotide has a length of up to 50 bases, and a common pattern of backbone chiral centers comprises at least one chirally controlled center which is a phosphorothioate in the Sp configuration. In some embodiments, a common base sequence comprises at least 15 contiguous bases of UCAAGGAAGAUGGCAUUUCU (SEQ ID NO: 1), the oligonucleotide has a length of up to 30 bases, and a common pattern of backbone chiral centers comprises at least one chirally controlled center which is a phosphorothioate in the Sp configuration. In some embodiments, a common base sequence comprises at least 15 contiguous bases of UCAAGGAAGAUGGCAUUUCU (SEQ ID NO: 1), the oligonucleotide has a length of up to 40 bases, and a common pattern of backbone chiral centers comprises at least one chirally controlled center which is a phosphorothioate in the Sp configuration. In some embodiments, a common base sequence comprises at least 15 contiguous bases of UCAAGGAAGAUGGCAUUUCU (SEQ ID NO: 1), the oligonucleotide has a length of up to 50 bases, and a common pattern of backbone chiral centers comprises at least one chirally controlled center which is a phosphorothioate in the Sp configuration. In some embodiments, a common base sequence comprises a sequence having no more than 5 mismatches from the sequence of bases of UCAAGGAAGAUGGCAUUUCU (SEQ ID NO: 1), the oligonucleotide has a length of up to 30 bases, and a common pattern of backbone chiral centers comprises at least one chirally controlled center which is a phosphorothioate in the Sp configuration. In some embodiments, a common base sequence comprises a sequence having no more than 5 mismatches from the sequence of bases of UCAAGGAAGAUGGCAUUUCU (SEQ ID NO: 1), the oligonucleotide has a length of up to 40 bases, and a common pattern of backbone chiral centers comprises at least one chirally controlled center which is a phosphorothioate in the Sp configuration. In some embodiments, a common base sequence comprises a sequence having no more than 5 mismatches from the sequence of bases of UCAAGGAAGAUGGCAUUUCU (SEQ ID NO: 1), the oligonucleotide has a length of up to 50 bases, and a common pattern of backbone chiral centers comprises at least one chirally controlled center which is a phosphorothioate in the Sp configuration.

[0285] In some embodiments, a common base sequence is UCAAGGAAGAUGGCAUUUCU (SEQ ID NO: 1), and a common pattern of backbone chiral centers comprises at least three chirally controlled centers. In some embodiments, a common base sequence comprises UCAAGGAAGAUGGCAUUUCU (SEQ ID NO: 1), the oligonucleotide has a length of up to 30 bases, and a common pattern of backbone chiral centers comprises at least three chirally controlled centers. In some embodiments, a common base sequence comprises UCAAGGAAGAUGGCAUUUCU (SEQ ID NO: 1), and the oligonucleotide has a length of up to 40 bases, and a common pattern of backbone chiral centers comprises at least three chirally controlled centers. In some embodiments, a common base sequence comprises UCAAGGAAGAUGGCAUUUCU (SEQ ID NO: 1), the oligonucleotide has a length of up to 50 bases, and a common pattern of backbone chiral centers comprises at least three chirally controlled centers. In some embodiments, a common base sequence comprises at least 15 contiguous bases of UCAAGGAAGAUGGCAUUUCU (SEQ ID NO: 1), the oligonucleotide has a length of up to 30 bases, and a common pattern of backbone chiral centers comprises at least three chirally controlled centers. In some embodiments, a common base sequence comprises at least 15 contiguous bases of UCAAGGAAGAUGGCAUUUCU (SEQ ID NO: 1), the oligonucleotide has a length of up to 40 bases, and a common pattern of backbone chiral centers comprises at least three chirally controlled centers. In some embodiments, a common base sequence comprises at least 15 contiguous bases of UCAAGGAAGAUGGCAUUUCU (SEQ ID NO: 1), the oligonucleotide has a length of up to 50 bases, and a common pattern of backbone chiral centers comprises at least three chirally controlled centers. In some embodiments, a common base sequence comprises a sequence having no more than 5 mismatches from the sequence of bases of UCAAGGAAGAUGGCAUUUCU (SEQ ID NO: 1), the oligonucleotide has a length of up to 30 bases, and a common pattern of backbone chiral centers comprises at least three chirally controlled centers. In some embodiments, a common base sequence comprises a sequence having no more than 5 mismatches from the sequence of bases of UCAAGGAAGAUGGCAUUUCU (SEQ ID NO: 1), the oligonucleotide has a length of up to 40 bases, and a common pattern of backbone chiral centers comprises at least three chirally controlled centers. In some embodiments, a common base sequence comprises a sequence having no more than 5 mismatches from the sequence of bases of UCAAGGAAGAUGGCAUUUCU (SEQ ID NO: 1), the oligonucleotide has a length of up to 50 bases, and a common pattern of backbone chiral centers comprises at least three chirally controlled centers.

[0286] In some embodiments, a common base sequence is UCAAGGAAGAUGGCAUUUCU (SEQ ID NO: 1), and a common pattern of backbone chiral centers comprises at least five chirally controlled centers which are each a phosphorothioate in the Sp configuration. In some embodiments, a common base sequence comprises UCAAGGAAGAUGGCAUUUCU (SEQ ID NO: 1), the oligonucleotide has a length of up to 30 bases, and a common pattern of backbone chiral centers comprises at least five chirally controlled centers which are each a phosphorothioate in the Sp configuration. In some embodiments, a common base sequence comprises UCAAGGAAGAUGGCAUUUCU (SEQ ID NO: 1), and the oligonucleotide has a length of up to 40 bases, and a common pattern of backbone chiral centers comprises at least five chirally controlled centers which are each a phosphorothioate in the Sp configuration. In some embodiments, a common base sequence comprises UCAAGGAAGAUGGCAUUUCU (SEQ ID NO: 1), the oligonucleotide has a length of up to 50 bases, and a common pattern of backbone chiral centers comprises at least five chirally controlled centers which are each a phosphorothioate in the Sp configuration. In some embodiments, a common base sequence comprises at least 15 contiguous bases of UCAAGGAAGAUGGCAUUUCU (SEQ ID NO: 1), the oligonucleotide has a length of up to 30 bases, and a common pattern of backbone chiral centers comprises at least five chirally controlled centers which are each a phosphorothioate in the Sp configuration. In some embodiments, a common base sequence comprises at least 15 contiguous bases of UCAAGGAAGAUGGCAUUUCU (SEQ ID NO: 1), the oligonucleotide has a length of up to 40 bases, and a common pattern of backbone chiral centers comprises at least five chirally controlled centers which are each a phosphorothioate in the Sp configuration. In some embodiments, a common base sequence comprises at least 15 contiguous bases of UCAAGGAAGAUGGCAUUUCU (SEQ ID NO: 1), the oligonucleotide has a length of up to 50 bases, and a common pattern of backbone chiral centers comprises at least five chirally controlled centers which are each a phosphorothioate in the Sp configuration. In some embodiments, a common base sequence comprises a sequence having no more than 5 mismatches from the sequence of bases of UCAAGGAAGAUGGCAUUUCU (SEQ ID NO: 1), the oligonucleotide has a length of up to 30 bases, and a common pattern of backbone chiral centers comprises at least five chirally controlled centers which are each a phosphorothioate in the Sp configuration. In some embodiments, a common base sequence comprises a sequence having no more than 5 mismatches from the sequence of bases of UCAAGGAAGAUGGCAUUUCU (SEQ ID NO: 1), the oligonucleotide has a length of up to 40 bases, and a common pattern of backbone chiral centers comprises at least five chirally controlled centers which are each a phosphorothioate in the Sp configuration. In some embodiments, a common base sequence comprises a sequence having no more than 5 mismatches from the sequence of bases of UCAAGGAAGAUGGCAUUUCU (SEQ ID NO: 1), the oligonucleotide has a length of up to 50 bases, and a common pattern of backbone chiral centers comprises at least five chirally controlled centers which are each a phosphorothioate in the Sp configuration.

[0287] In some embodiments, a common pattern of backbone chiral centers is selected from: SSS, SSSS, SSSSS, SOS, SSOSS, SSSOSSS, SSSSOSSSS, SSSSSOSSSSS, SSSSSSOSSSSSS, SSSSSSSOSSSSSSS, SSSSSSSSOSSSSSSSS, SSSSSSSSSOSSSSSSSSS, SOSOSOSOS, SSOSOSOSOSS, SSSOSOSOSOSSS, SSSSOSOSOSOSSSS, SSSSSOSOSOSOSSSSS, SSSSSSOSOSOSOSSSSSS, SOSOSSOOS, SSOSOSSOOSS, SSSOSOSSOOSSS, SSSSOSOSSOOSSSS, SSSSSOSOSSOOSSSSS, SSSSSSOSOSSOOSSSSSS, SOSOOSOOS, SSOSOOSOOSS, SSSOSOOSOOSSS, SSSSOSOOSOOSSSS, SSSSSOSOOSOOSSSSS, SSSSSSOSOOSOOSSSSSS, SOSOSSOOS, SSOSOSSOOSO, SSSOSOSSOOSOS, SSSSOSOSSOOSOSS, SSSSSOSOSSOOSOSSS, SSSSSSOSOSSOOSOSSSS, SOSOOSOOSO, SSOSOOSOOSOS, SSSOSOOSOOSOS, SSSSOSOOSOOSOSS, SSSSSOSOOSOOSOSSS, SSSSSSOSOOSOOSOSSSS, SSOSOSSOO, SSSOSOSSOOS, SSSSOSOSSOOS, SSSSSOSOSSOOSS, SSSSSSOSOSSOOSSS, OSSSSSSOSOSSOOSSS, OOSSSSSSOSOSSOOS, OOSSSSSSOSOSSOOSS, OOSSSSSSOSOSSOOSSS, OOSSSSSSOSOSSOOSSSS, OOSSSSSSOSOSSOOSSSSS, and OOSSSSSSOSOSSOOSSSSSS, wherein O is a non-chiral center and S is a chiral center in a Sp configuration. In some embodiments, the non-chiral center is phosphodiester. In some embodiments, the chiral center in a Sp configuration is a phosphorothioate.

[0288] In some embodiments, a sequence of an oligonucleotide includes any one or more of: base sequence (including length); pattern of chemical modifications to sugar and base moieties; pattern of backbone linkages; pattern of natural phosphate linkages, phosphorothioate linkages, phosphorothioate triester linkages, and combinations thereof, pattern of backbone chiral centers; pattern of stereochemistry (Rp/Sp) of chiral internucleotidic linkages; pattern of backbone phosphorus modifications; pattern of modifications on the internucleotidic phosphorus atom, such as —S—, and -L-R¹ of formula I.

[0289] In some embodiments, a muscle cell or tissue is selected from: skeletal muscle, smooth muscle, heart muscle, thoracic diaphragm, gastrocnemius, quadriceps, triceps, and/or heart.

[0290] In some embodiments, a method delivers the biologically active agent into the cytoplasm of a cell.

[0291] In some embodiments, a method delivers the biologically active agent into the nucleus of a cell.

[0292] In some embodiments, a chiral internucleoside linkage is a phosphorothioate.

[0293] In some embodiments, a common base sequence hybridizes with a transcript of dystrophin, myostatin, Huntingtin, a myostatin receptor, ActRIIB, ActRIIA, DMPK, Malat1, SMN2, dystrophia myotonica protein kinase (DMPK), Proprotein convertase subtilisin/kexin type 9 (PCSK9), SMAD7 or KRT14 (Keratin 14).

### BRIEF DESCRIPTION OF THE DRAWINGS

[0294] FIG. 1. Exon skipping mediated by a biologically active agent, oligonucleotide WV-942 (SEQ ID NO: 206), delivered via gymnotic delivery (not conjugated to a lipid), or conjugated to a lipid (listed in Table 1).

[0295] FIG. 2. Example lipid conjugates.

[0296] FIG. 3. In vivo pharmacokinetic (PK) data related to delivery of oligonucleotide WV-942 delivered via gymnotic delivery (not conjugated to a lipid), or conjugated to a lipid, to gastrocnemius, heart and quadriceps muscle tissues. Tested articles are listed in Table 1.

[0297] FIG. 4. In vivo pharmacokinetic (PK) data related to delivery of WV-942 delivered via gymnotic delivery (not conjugated to a lipid), or conjugated to a lipid, to gastrocnemius, heart and quadriceps and diaphragm muscle tissues.

[0298] FIG. 5. Standard curves for lipid conjugates in different tissues (quadriceps and thoracic diaphragm).

[0299] FIG. 6. Standard curves for lipid conjugates in different tissues (heart and gastrocnemius).

[0300] FIG. 7. Example structures of lipids and linkers for conjugation to a biologically active agent. Abbreviation: Oligo: an example oligonucleotide.

[0301] FIG. 8. Hybridization assay to detect ASO: Sandwich. Abbreviations: B: biotin; SA: streptavidin; AP: alkaline phosphatase; ASO: antisense oligonucleotide.

[0302] FIG. 9A to 9E. LC-MS and deconvoluted mass of lipid conjugates of various oligonucleotides.

[0303] FIGS. 10A and 10B. Sequences and the chemistry of various oligonucleotides: WV395 (SEQ ID NO: 2432) and WV884 to WV897 (SEQ ID NOS 1159-1172, respectively). The suffices 0.01 and 0.02 indicate batch numbers. These include stereopure (chirally pure) oligonucleotides or oligonucleotide compositions, including 2′-OMe modifications. FIG. 10B discloses SEQ ID NO: 206.

[0304] FIGS. 11A and 11B. Ability of various oligonucleotides to induce skipping of exon 51 of human dystrophin. FIG. 11B is a compilation of data, including three or more replicates. Controls: WV-942, WV-1714, and untreated; Concentration: 10 uM; Duration: 4 days in differentiation medium; treatment was gymnotic (without transfection reagent); Cells: Del 48-50 [Primary human myoblasts from a patient with (dystrophin deletion exon 48-50), DL 589.2 (dystrophin deletion exon 51-55)].

[0305] FIGS. 12A and 12B. Composition of PS (phosphorothioates) and 2′-F on the wings of various oligonucleotides, including WV-2095 to WV-2109 (SEQ ID NOS: 1144-1158, respectively). WV-2106 to WV-2109 are hemimers. FIG. 12B discloses SEQ ID NO: 434.

[0306] FIGS. 13A and 13B. Ability of various oligonucleotides to induce skipping of exon 51 of dystrophin. FIG. 13B shows additional data for WV-1714 (SEQ ID NO: 434). WV-1683 (SEQ ID NO: 426), a negative control in this experiment, targets mouse exon 23.

[0307] FIGS. 14A and 14B. Sequence and chemistry of various oligonucleotides, WV-1108 (SEQ ID NO: 1226) and WV-2381 to WV-2385 (SEQ ID NOS 1268-1272, respectively). These have PS (phosphorothioates) in the wings and PO (phosphorodiesters) in the core. FIG. 14B discloses SEQ ID NO: 474.

[0308] FIG. 15. Ability of various oligonucleotides to induce skipping of exon 51 of dystrophin. Controls: WV-942 (Drisapersen, stereorandom) and untreated; Concentration: 10 uM; Duration: 4 days in differentiation medium; Cells: Del 48-50; treatment was gymnotic (without transfection reagent).

[0309] FIGS. 16A and 16B. Sequences and chemistry of various oligonucleotides, WV-2366 to WV-2370 (SEQ ID NOS 1263-1267, respectively). These have phosphorothioates in the Sp conformation in the wings and PO (phosphorodiesters) in the core.

[0310] FIG. 17. Ability of various oligonucleotides to induce skipping of exon 51 of dystrophin. Controls: WV-942 and untreated; Concentration: 10 uM; Duration: 4 days in differentiation medium; Cells: Del 48-50; treatment was gymnotic (without transfection reagent).

[0311] FIG. 18. Sequences and chemistry of various oligonucleotides, which are 20-mers or 25-mers, including WV-2313 to WV-2320 (SEQ ID NOS 1091-1098, respectively), and WV-2223 to WV-2230 (SEQ ID NOS 1005-1012, respectively).

[0312] FIG. 19. Location of the sequences of various oligonucleotides, which are 20-mers or 25-mers, including WV-2313 to WV-2320, and WV-2223 to WV-2230, relative to the human (H) and mouse (M) dystrophin sequences (SEQ ID NOS 2434 and 2433, respectively).

[0313] FIG. 20. Ability of various oligonucleotides to induce skipping of exon 51 of dystrophin. Controls: WV-942 and untreated; Concentration: 10 uM; Duration: 4 days in differentiation medium; Cells: Del 48-50; treatment was gymnotic (without transfection reagent).

[0314] FIG. 21 shows the efficacy of stereopure oligonucleotides with 2′-F wings and either PO or Rp cores, in skipping exon 51 of human dystrophin, compared to WV-942 (Drisapersen). Treatment was 10 μM, gymnotic treatment.

[0315] FIG. 22 shows the efficacy of stereopure oligonucleotides in skipping exon 51 of human dystrophin, compared to WV-942. Data for two different doses, 3 μM and 10 μM, are presented. On the bottom left are stereorandomers with different patterns of 2′-F and 2′-OMe modifications (SEQ ID NOS 429-436, respectively, in order of appearance). On the bottom right are stereopure oligonucleotides.

[0316] FIG. 23 shows the efficacy of various oligonucleotides; shown are fold-changes compared to WV-942. Data for two different doses, 3 μM and 10 μM, are presented.

[0317] FIG. 24 shows an example of a CA (carbonic anhydrase) inhibitor and an example linker, for attachment to a biologically active agent (as a non-limiting example, an oligonucleotide).

[0318] FIG. 25 shows example skipping efficiency of oligonucleotides comprising lipid moieties in skipping exon 51 of human dystrophin. Data for different doses from 0.3 μM to 30 μM, are presented. Skipping efficiency generally increases with increased concentration. WV-3545 (WV-3473 conjugated to stearic acid by PO and C6 amino linker) and WV-3546 (WV-3473 conjugated to turbinaric acid by PO and C6 amino linker), both containing lipid moieties, demonstrated higher efficiency. Treatment was gymnotic (without transfection reagent). The experiment was done in triplicate, with average data shown.

[0319] FIG. 26 shows that several example provided oligonucleotides do not have hTLR9 agonist activity under the tested conditions. The experiment was done in triplicate, with average data shown.

[0320] FIG. 27 shows that example provided oligonucleotides comprising lipid moieties can effectively counteract hTLR9 agonistic activity (and to antagonize hTLR9). As demonstrated, conjugates of lipids (e.g., stearic acid (WV-3545) or turbinaric acid (WV-3546)) and oligonucleotides (e.g., WV-3473 (WV-3545 and WV-3546)) have significantly increased hTLR9 antagonistic activities. The concentration of agonistic oligonucleotide ODN2006 was held constant at 0.3 μM. Each oligonucleotide was tested at decreasing concentrations of: 5, 2.5, 1.25, 0.6, 0.3, 0.15 and 0.075 μM (from left to right). Treatment was gymnotic (without transfection reagent). The experiment was done in triplicate, with average data shown.

[0321] FIG. 28 shows that example provided oligonucleotides comprising lipid moieties can effectively counteract hTLR9 agonistic activity (and to antagonize hTLR9). As demonstrated, conjugates of lipids (e.g., stearic acid (WV-3545) or turbinaric acid (WV-3546)) and oligonucleotides (e.g., WV-3473 (WV-3545 and WV-3546)) have significantly increased hTLR9 antagonistic activities. neg: negative control (buffer only). ODN2006c: an agonistic control in which the CpG sequence is replaced by GpC. PMO: Eteplirsen. The concentration of agonistic oligonucleotide ODN2006 was held constant at 0.3 μM. Each oligonucleotide was tested at decreasing concentrations of: 5, 2.5, 1.25, 0.6, 0.3, 0.15 and 0.075 μM (from left to right). Treatment was gymnotic (without transfection reagent). The experiment was done in triplicate, with average data shown.

[0322] FIG. 29 shows that example provided oligonucleotides comprising various lipid moieties can significantly improve skipping efficiency compared to WV-942. Data for two doses, 3 μM (right column) and 10 μM (left column), are presented. Treatment was gymnotic (without transfection reagent). ND: not determined.

[0323] FIG. 30 shows example skipping efficiency of example provided oligonucleotides in skipping exon 51 of human dystrophin. Lipid conjugation (WV-3534, WV-3553, WV-3546, and WV-4106) significantly improved efficiency. Skipping efficiency generally increases with increased concentration. Data for four different doses, 1 μM, 3 μM, 10 μM and 10 μM are presented. DMD del48-50 cells were used. Treatment was gymnotic (without transfection reagent). Figure discloses SEQ ID NOS 703, 721, 728, 722, and 750, respectively, in order of appearance.

[0324] FIGS. 31A to 31D show the distribution of oligonucleotides in various muscle tissues: gastrocnemius (FIG. 31A); triceps (FIG. 31B); heart (FIG. 31C); and diaphragm (FIG. 31D). Oligonucleotides tested were: WV-3473 (SEQ ID NO: 703), WV-3545 (SEQ ID NO: 721) and WV-3546 (SEQ ID NO: 722), with WV-942 (SEQ ID NO: 206) as a control. Example oligonucleotides comprising lipid moieties have improved distributions to one or more muscle tissues, and/or may be readily cleared after a period of time compared to the control.

### DETAILED DESCRIPTION OF CERTAIN EMBODIMENTS

### 1. Definitions

[0325] As used herein, the following definitions shall apply unless otherwise indicated. For purposes of this disclosure, the chemical elements are identified in accordance with the Periodic Table of the Elements, CAS version, Handbook of Chemistry and Physics, 75th Ed. Additionally, general principles of organic chemistry are described in “Organic Chemistry”, Thomas Sorrell, University Science Books, Sausalito: 1999, and “March's Advanced Organic Chemistry”, 5th Ed., Ed.: Smith, M. B. and March, J., John Wiley & Sons, New York: 2001, the entire contents of which are hereby incorporated by reference.

[0326] Aliphatic: As used herein, “aliphatic” means a straight-chain (i.e., unbranched) or branched, substituted or unsubstituted hydrocarbon chain that is completely saturated or that contains one or more units of unsaturation, or a substituted or unsubstituted monocyclic, bicyclic, or polycyclic hydrocarbon ring that is completely saturated or that contains one or more units of unsaturation (but not aromatic), or combinations thereof. Unless otherwise specified, aliphatic groups contain 1-100 aliphatic carbon atoms. In some embodiments, aliphatic groups contain 1-20 aliphatic carbon atoms. In other embodiments, aliphatic groups contain 1-10 aliphatic carbon atoms. In other embodiments, aliphatic groups contain 1-9 aliphatic carbon atoms. In other embodiments, aliphatic groups contain 1-8 aliphatic carbon atoms. In other embodiments, aliphatic groups contain 1-7 aliphatic carbon atoms. In other embodiments, aliphatic groups contain 1-6 aliphatic carbon atoms. In still other embodiments, aliphatic groups contain 1-5 aliphatic carbon atoms, and in yet other embodiments, aliphatic groups contain 1, 2, 3, or 4 aliphatic carbon atoms. Suitable aliphatic groups include, but are not limited to, linear or branched, substituted or unsubstituted alkyl, alkenyl, alkynyl groups and hybrids thereof.

[0327] Alkenyl: As used herein, the term “alkenyl” refers to an alkyl group, as defined herein, having one or more double bonds.

[0328] Alkyl: As used herein, the term “alkyl” is given its ordinary meaning in the art and may include saturated aliphatic groups, including straight-chain alkyl groups, branched-chain alkyl groups, cycloalkyl (alicyclic) groups, alkyl substituted cycloalkyl groups, and cycloalkyl substituted alkyl groups. In some embodiments, alkyl has 1-100 carbon atoms. In certain embodiments, a straight chain or branched chain alkyl has about 1-20 carbon atoms in its backbone (e.g., C₁-C₂₀ for straight chain, C₂-C₂₀ for branched chain), and alternatively, about 1-10. In some embodiments, cycloalkyl rings have from about 3-10 carbon atoms in their ring structure where such rings are monocyclic, bicyclic, or polycyclic, and alternatively about 5, 6 or 7 carbons in the ring structure. In some embodiments, an alkyl group may be a lower alkyl group, wherein a lower alkyl group comprises 1-4 carbon atoms (e.g., C₁-C₄ for straight chain lower alkyls).

[0329] Alkynyl: As used herein, the term “alkynyl” refers to an alkyl group, as defined herein, having one or more triple bonds.

[0330] Animal: As used herein, the term “animal” refers to any member of the animal kingdom. In some embodiments, “animal” refers to humans, at any stage of development. In some embodiments, “animal” refers to non-human animals, at any stage of development. In certain embodiments, the non-human animal is a mammal (e.g., a rodent, a mouse, a rat, a rabbit, a monkey, a dog, a cat, a sheep, cattle, a primate, and/or a pig). In some embodiments, animals include, but are not limited to, mammals, birds, reptiles, amphibians, fish, and/or worms. In some embodiments, an animal may be a transgenic animal, a genetically-engineered animal, and/or a clone.

[0331] Antibody: The terms “antibody”, “immunoglobulin” and related terms, as used herein, refer to a protein (or fragment thereof, or biologically active fragment thereof) produced mainly by plasma cells that is used by the immune system to recognize, identify and/or neutralize specific antigens, epitopes, structures, pathogens, nucleic acids and other molecules. In some embodiments, an antibody recognizes a unique molecule of the harmful agent, called an antigen, via the variable region. In some embodiments, antibodies include, without limitation: monoclonal antibodies (including full length antibodies which have an immunoglobulin Fc region), antibody compositions with polyepitopic specificity, multispecific antibodies (e.g., bispecific antibodies, diabodies, and single-chain molecules), as well as antibody fragments. In some embodiments, an antibody is a monoclonal antibody, for example, an antibody obtained from a population of substantially homogeneous antibodies. In some embodiments, an antibody is a chimeric antibody, in which a portion of the heavy and/or light chain is identical with or homologous to corresponding sequences in antibodies derived from a particular species or belonging to a particular antibody class or subclass, while the remainder of the chain(s) is(are) identical with or homologous to corresponding sequences in antibodies derived from another species or belonging to another antibody class or subclass, as well as fragments of such antibodies, so long as they exhibit the desired biological activity. Chimeric antibodies of interest herein include, but are not limited to, “primatized” antibodies comprising variable domain antigen-binding sequences derived from a non-human primate (e.g., Old World Monkey, Ape etc.) and human constant region sequences. In some embodiments, an antibody fragment comprises a portion of an intact antibody, preferably the antigen binding and/or the variable region of the intact antibody. Non-limiting examples of antibody fragments include Fab, Fab′, F(ab′)2 and Fv fragments; diabodies; linear antibodies; nanobodies; single-chain antibody molecules and multispecific antibodies formed from antibody fragments. In some embodiments, an antibody can be of any of five classes, IgA, IgD, IgE, IgG and IgM, and may be encoded by a mRNA, including the heavy chains designated alpha, delta, epsilon, gamma and mu, respectively. In some embodiments, any of the subclasses of antibodies may be encoded in part or in whole and include the following subclasses: IgG1, IgG2, IgG3, IgG4, IgA1 and IgA2. In various embodiments, an antibody can be utilized to treat conditions or diseases in many therapeutic areas such as, but not limited to, blood, cardiovascular, CNS, poisoning (including antivenoms), dermatology, endocrinology, gastrointestinal, medical imaging, musculoskeletal, oncology, immunology, respiratory, sensory and anti-infective. In some embodiments, an antibody is any of antibody variants, including, but not limited to, substitutional variants, conservative amino acid substitution, insertional variants, deletional variants and/or covalent derivatives. In one embodiment, the primary construct and/or mmRNA disclosed herein may encode an immunoglobulin Fc region. In another embodiment, the primary constructs and/or mmRNA may encode a variant immunoglobulin Fc region. In some embodiments, the primary constructs and/or mmRNA may encode an antibody having a variant immunoglobulin Fc region as described in U.S. Pat. No. 8,217,147.

[0332] Antisense oligonucleotide: The terms “antisense oligonucleotide” or “ASO”, as used herein, refer to an oligonucleotide or the like having, comprising, or consisting of a sequence of bases or the like which allow the oligonucleotide or the like to hybridize to a target molecule, such as another nucleic acid, modified nucleic acid or nucleic acid analog, e.g., by base-pairing, such as Watson-Crick base-pairing or non-Watson-Crick basepairing. In some embodiments, an antisense oligonucleotide is fully complementary or nearly fully complementary to the target molecule. In some embodiments, any olignucleotide of any type described herein or known in the art can be used as an antisense oligonucleotide. In various embodiments, an antisense oligonucleotide can perform or participate in any of various biological functions, including RNA interference, RNaseH-mediated cleavage, exon skipping, the prevention of exon skipping, the enhancement or blocking of an agent (e.g., a protein, RNA, protein-RNA complex, or any other molecule) from binding to another nucleic acid, or any other biological function performed by an antisense oligonucleotide, as described herein or known in the art. In some embodiments, an antisense oligonucleotide is an oligonucleotide which participates in RNaseH-mediated cleavage; for example, an antisense oligonucleotide hybridizes in a sequence-specific manner to a portion of a target mRNA, thus targeting the mRNA for cleavage my RNaseH. In some embodiments, an antisense oligonucleotide is able to differentiate between a wild-type and a mutant allele of a target. In some embodiments, an antisense oligonucleotide significantly participates in RNaseH-mediated cleavage of a mutant allele but participates in RNaseH-mediated cleavage of a wild-type allele to a much less degree (e.g., does not significantly participate in RNaseH-mediated cleavage of the wild-type allele of the target).

[0333] Approximately: As used herein, the terms “approximately” or “about” in reference to a number are generally taken to include numbers that fall within a range of 5%, 10%, 15%, or 20% in either direction (greater than or less than) of the number unless otherwise stated or otherwise evident from the context (except where such number would be less than 0% or exceed 100% of a possible value). In some embodiments, use of the term “about” in reference to dosages means±5 mg/kg/day.

[0334] Aptamer: The term “aptamer”, as used herein, refers to a nucleic acid molecule, e.g., a molecule comprising a RNA, DNA or nucleotide analog, that is capable of binding to a specific molecule with high affinity and specificity (Ellington et al., Nature 346, 818-22 (1990); and Tuerk et al., Science 249, 505-10 (1990)). In various embodiments, a ligand that binds to an aptamer includes, without limitation, small molecules, such as drugs, metabolites, intermediates, cofactors, transition state analogs, ions, metals, nucleic acids, and toxins. In some embodiments, an aptamer may also bind natural and synthetic polymers, including proteins, peptides, nucleic acids, polysaccharides, glycoproteins, hormones, receptors and cell surfaces such as cell walls and cell membranes. In some embodiments, an aptamer is between about 10 and about 300 nucleotides in length. In some embodiments, an aptamer is between about 30 and about 100 nucleotides in length. In some embodiments, an aptamer is made that bind to a wide variety of molecules. Each of these molecules can be used as a modulator of gene expression. In some embodiments, organic molecules, nucleotides, amino acids, polypeptides, target features on cell surfaces, ions, metals, salts, saccharides, have all been shown to be suitable for isolating aptamers that can specifically bind to the respective ligand. For instance, organic dyes such as Hoechst 33258 have reportedly been used as target ligands in vitro aptamer selections (Werstuck and Green, Science 282:296-298 (1998)). Other small organic molecules like dopamine, theophylline, sulforhodamine B, and cellobiose have also been reported as ligands in the isolation of aptamers. In some embodiments, an aptamers is been isolated for antibiotics such as kanamycin A, lividomycin, tobramycin, neomycin B, viomycin, chloramphenicol and streptomycin. For a review of aptamers that recognize small molecules, see Famulok, Science 9:324-9 (1999). In some embodiments, a ligand of the aptamer of an aptamer-regulated nucleic acid of the invention is a cell-permeable, small organic molecule. Small organic molecules which do not have a general inhibitory effect on translation can be used as ligands. The small molecule can also exhibit in vivo persistence sufficient for achieving a desired level of inhibition of translation. The molecules also can be screened to identify those that are bioavailable after, for example, oral administration. In some embodiments, the ligand is nontoxic. The ligand may optionally be a drug, including, for example, a steroid. In some embodiments, in some of the methods of controlling gene expression, a ligand can be pharmacologically inert. In some embodiments, a ligand is a polypeptide whose presence in the cell is indicative of a disease or pathological condition. In other embodiments, the ligand for an aptamer is an antibiotic, such as chloramphenicol. In an alternative embodiment, the ligand of the aptamer is an organic dye such as Hoeschst dye 33258. In still another embodiment, the ligand may be a metal ion. In a specific embodiment, the aptamer domain of an aptamer-regulated nucleic acid responds to binding to caffeine. In some embodiments, an aptamers is developed to bind particular ligands by employing known in vivo or in vitro (most typically, in vitro) selection techniques known as SELEX (Ellington et al., Nature 346, 818-22 (1990); and Tuerk et al., Science 249, 505-10 (1990)). Methods of making aptamers are also described in, for example, U.S. Pat. No. 5,582,981, PCT Publication No. WO 00/20040, U.S. Pat. No. 5,270,163, Lorsch and Szostak, Biochemistry, 33:973 (1994), Mannironi et al., Biochemistry 36:9726 (1997), Blind, Proc. Nat'l. Acad. Sci. USA 96:3606-3610 (1999), Huizenga and Szostak, Biochemistry, 34:656-665 (1995), PCT Publication Nos. WO 99/54506, WO 99/27133, WO 97/42317 and U.S. Pat. No. 5,756,291. In some embodiments, aptamers include those that target any of: VEGF, tissue factor pathway inhibitor (TFPI), Factor IXa, complement component 5 (C5), HIV Tat protein, and HIV Rev protein.

[0335] Aryl: The term “aryl”, as used herein, used alone or as part of a larger moiety as in “aralkyl,” “aralkoxy,” or “aryloxyalkyl,” refers to monocyclic, bicyclic or polycyclic ring systems having a total of five to thirty ring members, wherein at least one ring in the system is aromatic. In some embodiments, an aryl group is a monocyclic, bicyclic or polycyclic ring system having a total of five to fourteen ring members, wherein at least one ring in the system is aromatic, and wherein each ring in the system contains 3 to 7 ring members. In some embodiments, an aryl group is a biaryl group. The term “aryl” may be used interchangeably with the term “aryl ring.” In certain embodiments of the present disclosure, “aryl” refers to an aromatic ring system which includes, but not limited to, phenyl, biphenyl, naphthyl, binaphthyl, anthracyl and the like, which may bear one or more substituents. Also included within the scope of the term “aryl,” as it is used herein, is a group in which an aromatic ring is fused to one or more non-aromatic rings, such as indanyl, phthalimidyl, naphthimidyl, phenanthridinyl, or tetrahydronaphthyl, and the like. In some embodiments, an aryl group has a radical or point of attachment on an aromatic ring.

[0336] Biologically active agent: The term “biologically active agent”, as used herein, refers to any agent (including, but not limited to, an active compound) which has, mediates, or participates in a biological activity. In various embodiments, a biologically active agent can be organic or in-organic. Non-limiting examples of biologically active agents include: a small molecule, a peptide, a protein, a component of a CRISPR-Cas system, a carbohydrate, a therapeutic agent, a chemotherapeutic agent, a vaccine, a nucleic acid, and a lipid. In some embodiments, a biologically active agent includes an inorganic or organic molecule including a small molecule, peptide (e.g. cell penetrating peptides), carbohydrate (including monosaccharides, oligosaccharides, and polysaccharides), protein (including nucleoprotein, mucoprotein, lipoprotein, synthetic polypeptide, or a small molecule linked to a protein, glycoprotein), steroid, nucleic acid, lipid, hormone, or combination thereof, that causes a biological effect when administered in vivo to an animal, including but not limited to birds and mammals, including humans. In some embodiments, the biologically active agent is charged. In some embodiments, the biologically active agent is positively charged. In some embodiments, the biologically active agent is negatively charged. In some embodiments, a biologically active agent is selected from: 16-alpha fluoroestradiol, 16-alpha-gitoxin, 16-epiestriol, 17-alpha dihydroequilenin, 17-alpha estradiol, 17-beta estradiol, 17-hydroxy progesterone, 1-alpha-hydroxyvitamin D2, 1-dodecpyrrolidinone, 20-epi-1,25 dihydroxyvitamin D3, 22-oxacalcitriol, 2CW, 2′-nor-cGMP, 3-isobutyl GABA, 5-ethynyluracil, 6-FUDCA, 7-methoxytacrine, Abamectin, abanoquil, abecarnil, abiraterone, Ablukast, Ablukast Sodium, Acadesine, acamprosate, Acarbose, Acebutolol, Acecamide Hydrochloride, Aceclidine, aceclofenae, Acedapsone, Aceglutamide Aluminum, Acemannan, Acetaminophen, Acetazolamide, Acetohexamide, Acetohydroxamic Acid, acetomepregenol, Acetophenazine Maleate, Acetosulfone Sodium, Acetylcholine Chloride, Acetylcysteine, acetyl-L-carnitine, acetylmethadol, Acifran, acipimox, acitemate, Acitretin,Acivicin, Aclarubicin, aclatonium, Acodazole Hydrochloride, aconiazide, Acrisorcin, Acrivastine, Acronine, Actisomide, Actodigin, Acyclovir, acylfulvene, adafenoxate, adapalene, Adapalene, adatanserin, Adatanserin Hydrochloride, adecypenol, adecypenol, Adefovir, adelmidrol, ademetionine, Adenosine, Adinazolam, Adipheinine Hydrochloride, adiposin, Adozelesin, adrafinil, Adrenalone, airbutamine, alacepril, Alamecin, Alanine, Alaproclate, alaptide, Albendazole, albolabrin, Albuterol, Albutoin, Alclofenae, Alclometasone Dipropionate, Alcloxa, aldecalmycin, Aldesleukin, Aldioxa, Alendronate Sodium, alendronic acid, alentemol, Alentemol Hydrobromide, Aletamine Hydrochloride, Aleuronium Chloride, Alexidine, alfacalcidol, Alfentanil Hydrochloride, alfuzosin, Algestone Acetonide, alglucerase, Aliflurane, alinastine, Alipamide, Allantoin, Allobarbital, Allopurinol, ALL-TK antagonists, Alonimid, alosetron, Alosetron Hydrochloride, Alovudine, Alpertine, Alpha Amylase, alpha idosone, Alpidem, Alprazolam, Alprenolol Hydrochloride, Alprenoxime Hydrochloride, Alprostadil, Alrestatin Sodium, Altanserin Tartrate, Alteplase, Althiazide, Altretamine, altromycin B, Alverinc Citrate, Alvircept Sudotox, Amadinone Acetate, Amantadine Hydrochloride, ambamustine, Ambomycin, Ambruticin, Ambuphylline, Ambuside, Amcinafal, Amcinonide, Amdinocillin, Amdinocillin Pivoxil, Amedalin Hydrochloride, amelometasone, Ameltolide, Amesergide, Ametantrone Acetate, amezinium metilsulfate, amfebutamone, Amfenac Sodium, Amflutizole, Amicycline, Amidephrine Mesylate, amidox, Amifloxacin, amifostine, Amikacin, Amiloride Hydrochloride, Aminacrine Hydrochloride, Aminobenzoate Potassium, Aminobenzoate Sodium, Aminocaproic Acid, Aminoglutethimide, Aminohippurate Sodium, aminolevulinic acid, Aminophylline, A minorex, Aminosalicylate sodium, Aminosalicylic acid, Amiodarone, Amiprilose Hydrochloride, Amiquinsin Hydrochloride, amisulpride, Amitraz, Amitriptyline Hydrochloride, Amlexanox, amlodipine, Amobarbital Sodium, Amodiaquine, Amodiaquine Hydrochloride, Amorolfine, Amoxapine, Amoxicillin, Amphecloral, Amphetamine Sulfate, Amphomycin, Amphotericin B, Ampicillin, ampiroxicam, Ampyzine Sulfate, Amquinate, Amrinone, aminone, amrubicin, Amsacrine, amylin, amythiamicin, Anagestone Acetate, anagrelide, Anakinra, ananain, anaritide, Anaritide Acetate, Anastrozole, Anazolene Sodium, Ancrod, andrographolide, Androstenedione, angiogenesis inhibitors, Angiotensin Amide, Anidoxime, Anileridine, Anilopam Hydrochloride, Aniracetam, Anirolac, Anisotropine Methylbromide, Anistreplase, Anitrazafen, anordrin, antagonist D, antagonist G, antarelix, Antazoline Phosphate, Anthelmycin, Anthralin, Anthramycin, antiandrogen, Acedapsone, Felbamate, antiestrogen, antineoplaston, Antipyrine, antisense oligonucleotides, apadoline, apafant, Apalcillin Sodium, apaxifylline, Apazone, aphidicolin glycinate, Apixifylline, Apomorphine Hydrochloride, apraclonidine, Apraclonidine Hydrochloride, Apramycin, Aprindine, Aprindine Hydrochloride, aprosulate sodium, Aprotinin, Aptazapine Maleate, aptiganel, apurinic acid, apurinic acid, aranidipine, Aranotin, Arbaprostil, arbekicin, arbidol, Arbutamine Hydrochloride, Arclofenin, Ardeparin Sodium, argatroban, Arginine, Argipressin Tannate, Arildone, aripiprazol, arotinolol, Arpinocid, Arteflene, Artilide Fumarate, asimadoline, aspalatone, Asparaginase, Aspartic Acid, Aspartocin, asperfuran, Aspirin, aspoxicillin, Asprelin, Astemizole, Astromicin Sulfate, asulacrine, atamestane, Atenolol, atevirdine, Atipamezole, Atiprosin Maleate, Atolide, Atorvastatin Calcium, Atosiban, Atovaquone, atpenin B, Atracurium Besylate, atrimustine, atrinositol, Atropine, Auranofin, aureobasidin A, Aurothioglucose, Avilamycin, Avoparcin, Avridine, Axid, axinastatin 1, axinastatin 2, axinastatin 3, Azabon, Azacitidinie, Azaclorzine Hydrochloride, Azaconazole, azadirachtine, Azalanstat Dihydrochloride, Azaloxan Fumarate, Azanator Maleate, Azanidazole, Azaperone, Azaribine, Azaserine, azasetron, Azatadine Maleate, Azathioprine, Azathioprine Sodium, azatoxin, azatyrosine, azelaic acid, azelastine, azelnidipine, Azepindole, Azetepa, azimilide, Azithromycin, Azlocillin, Azolimine, Azosemide, Azotomycin, Aztreonam, Azumolene Sodium, Bacampicillin Hydrochloride, baccatin III, Bacitracin, Baclofen, bacoside A, bacoside B, bactobolamine, balanol, balazipone, balhimycin, balofloxacin, balsalazide, Bambermycins, bambuterol, Bamethan Sulfate, Bamifylline Hydrochloride, Bamidazole, baohuoside 1, Barmastine, barnidipine, Basifungin, Batanopride Hydrochloride, batebulast, Batelapine Maleate, Batimastat, beauvericin, Becanthone Hydrochloride, becaplermin, becliconazole, Beclomethasone Dipropionate, befloxatone, Beinserazide, Belfosdil, Belladonna, Beloxamide, Bemesetron, Bemitradine, Bemoradan, Benapryzine Hydrochloride, Benazepril Hydrochloride, Benazeprilat, Bendacalol Mesylate, Bendazac, Bendroflumethiazide, benflumetol, benidipine, Benorterone, Benoxaprofen, Benoxaprofen, Benoxinate Hydrochloride, Benperidol, Bentazepam, Bentiromide, Benurestat, Benzbromarone, Benzethonium Chloride, Benzetimide Hydrochloride, Benzilonium Bromide, Benzindopyrine Hydrochloride, benzisoxazole, Benzocaine, benzochlorins, Benzoctamine Hydrochloride, Benzodepa, benzoidazoxan, Benzonatate, Benzoyl Peroxide, Benzoylpas Calcium, benzoylstaurosporine, Benzquinamide, Benzthiazide, benztropine, Benztropine Mesylate, Benzydamine Hydrochloride, Benzylpenicilloyl Polylysine, bepridil, Bepridil Hydrochloride, Beractant, Beraprost, Berefrine, berlafenone, bertosamil, Berythromycin, besipirdine, beta-alethine, betaclamycin B, Betamethasone, betamipron, betaxolol, Betaxolol Hydrochloride, Bethanechol Chloride, Bethanidine Sulfate, betulinic acid, bevantolol, Bevantolol Hydrochloride, Bezafibrate, bFGF inhibitor, Bialamicol Hydrochloride, Biapenem, Bicalutamide, Bicifadine Hydrochloride, Biclodil Hydrochloride, Bidisomide, bifemelane, Bifonazole, bimakalim, bimithil, Bindarit, Biniramycin, binospirone, bioxalomycin alpha2, Bipenamol Hydrochloride, Biperiden, Biphenamine Hydrochloride, biriperone, bisantrene, bisaramil, bisaziridinylspermine, bis-benzimidazole A, bis-benzimidazole B, bisnafide, Bisobrin Lactate, Bisoprolol, Bispyrithione Magsulfex, bistramide D, bistramide K, bistratene A, Bithionolate Sodium, Bitolterol Mesylate, Bivalirudin, Bizelesin, Bleomycin Sulfate, Bolandiol Dipropionate, Bolasterone, Boldenone Undecylenate, boldine, Bolenol, Bolmantalate, bopindolol, Bosentan, Boxidine, brefeldin, breflate, Brequinar Sodium, Bretazenil, Bretylium Tosylate, Brifentanil Hydrochloride, brimonidine, Brinolase, Brocresine, Brocrinat, Brofoxine, Bromadoline Maleate, Bromazepam, Bromchlorenone, Bromelains, bromfenac, Brominidione, Bromocriptine, Bromodiphenhydramine Hydrochloride, Bromoxamide, Bromperidol, Bromperidol Decanoate, Brompheniramine Maleate, Broperamole, Bropirimine, Brotizolam, Bucamide Maleate, bucindolol, Buclizine Hydrochloride, Bucromarone, Budesonide, budipine, budotitane, Buformin, Bumetamide, Bunaprolast, bunazosin, Bunolol Hydrochloride, Bupicomide, Bupivacaine Hydrochloride, Buprenorphine Hydrochloride, Bupropion Hydrochloride, Buramate, Buserelin Acetate, Buspirone Hydrochloride, Busulfan, Butabarbital, Butacetin, Butaclamol Hydrochloride, Butalbital, Butamben, Butamirate Citrate, Butaperazine, Butaprost, Butedronate Tetrasodium, butenafine, Buterizine, buthionine sulfoximine, Butikacin, Butilfenin, Butirosin Sulfate, Butixirate, butixocort propionate, Butoconazole Nitrate, Butonate, Butopamine, Butoprozine Hydrochloride, Butorphanol, Butoxamine Hydrochloride, Butriptyline Hydrochloride, Cactinomycin, Cadexomer Iodine, Caffeine, calanolide A, Calcifediol, Calcipotriene, calcipotriol, Calcitonin, Calcitriol, Calcium Undecylenate, calphostin C, Calusterone, Cambendazole, camonagrel, camptothecin derivatives, canarypox IL-2, candesartan, Candicidin, candoxatril, candoxatrilat, Caniglibose, Canrenoate Potassium, Canrenone, capecitabine, Capobenate Sodium, Capobenic Acid, Capreomycin Sulfate, capromab, capsaicin, Captopril, Capuride, Caracemide, Carbachol, Carbadox, Carbamazepine, Carbamide Peroxide, Carbantel Lauryl Sulfate, Carbaspirin Calcium, Carbazeran, carbazomycin C, Carbenicillin Potassium, Carbenoxolone Sodium, Carbetimer, carbetocin, Carbidopa, Carbidopa-Levodopa, Carbinoxamine Maleate, Carbiphene Hydrochloride, Carbocloral, Carbocysteine, Carbol-Fuchsin, Carboplatin, Carboprost, carbovir, carboxamide-amino-triazole, carboxyamidotriazole, carboxymethylated beta-1,3-glucan, Carbuterol Hydrochloride, CaRest M3, Carfentanil Citrate, Carisoprodol, Carmantadine, Carmustine, CARN 700, Camidazole, Caroxazone, carperitide, Carphenazine Maleate, Carprofen, Carsatrin Succinate, Cartazolate, carteolol, Carteolol Hydrochloride, cartilage derived inhibitor, Carubicin Hydrochloride, Carumonam Sodium, carvedilol, carvotroline, Carvotroline Hydrochloride, carzelesin, casein kinase inhibitors (ICOS), castanospermine, caurumonam, cebaracetam, cecropin B, Cedefingol, Cefaclor, Cefadroxil, Cefamandole, Cefaparole, Cefatrizine, Cefazaflur Sodium, Cefazolin, Cefbuperazone, cefcapene pivoxil, cefdaloxime pentexil tosilate, Cefdinir, cefditoren pivoxil, Cefepime, cefetamet, Cefetecol, cefixime, cefluprenam, Cefinenoxime Hydrochloride, Cefinetazole, cefminlox, cefodizime, Cefonicid Sodium, Cefoperazone Sodium, Ceforamide, cefoselis, Cefotaxime Sodium, Cefotetan, cefotiam, Cefoxitin, cefozopran, cefpimizole, Cefpiramide, cefpirome, cefpodoxime proxetil, cefprozil, Cefroxadine, cefsulodin, Ceftazidime, cefteram, ceftibuten, Ceftizoxime Sodium, ceftriaxone, Cefuroxime, celastrol, celikalim, celiprolol, cepacidiine A, Cephacetrile Sodium, Cephalexin, Cephaloglycin, Cephaloridine, Cephalothin Sodium, Cephapirin Sodium, Cephradine, cericlamine, cerivastatin, Ceronapril, certoparin sodium, Ceruletide, Cetaben Sodium, Cetalkonium Chloride, Cetamolol Hydrochloride, cetiedil, cetirizine, Cetophenicol, Cetraxate Hydrochloride, cetrorelix, Cetylpyridinium Chloride, Chenodiol, Chlophedianol Hydrochloride, Chloral Betaine, Chlorambucil, Chloramphenicol, Chlordantoin, Chlordiazepoxide, Chlorhexidine Gluconate, chlorins, Chlormadinone Acetate, chloroorienticin A, Chloroprocaine Hydrochloride, Chloropropamide, Chloroquine, chloroquinoxaline sulfonamide, Chlorothiazide, Chlorotrianisene, Chloroxine, Chloroxylenol, Chlorphenesin Carbamate, chlorpheniramine Maleate, Chlorpromazine, Chlorpropamide, Chlorprothixene, Chlortetracycline Bisulfate, Chlorthalidone, Chlorzoxazone, Cholestyramine Resin, Chromonar Hydrochloride, cibenzoline, cicaprost, Ciclafrine Hydrochloride, Ciclazindol, ciclesonide, cicletanine, Ciclopirox, Cicloprofen, cicloprolol, Cidofovir, Cidoxepin Hydrochloride, Cifenline, Ciglitazone, Ciladopa Hydrochloride, cilansetron, Cilastatin Sodium, Cilazapril, cilnidipine, Cilobamine Mesylate, cilobradine, Cilofungin, cilostazol, Cimaterol, Cimetidine, cimetropium bromide, Cinalukast, Cinanserin Hydrochloride, Cinepazet Maleate, Cinflumide, Cingestol, cinitapride, Cinnamedrine, Cinnarizine, cinolazepam, Cinoxacin, Cinperene, Cinromide, Cintazone, Cintriamide, Cioteronel, Cipamfylline, Ciprefadol Succinate, Ciprocinonide, Ciprofibrate, Ciprofloxacin, ciprostene, Ciramadol, Cirolemycin, cisapride, cisatracurium besilate, Cisconazole, Cisplatin, cis-porphyrin, cistinexine, citalopram, Citenamide, citicoline, citreamicin alpha, cladribine, Clamoxyquin Hydrochloride, Clarithromycin, clausenamide, Clavulanate Potassium, Clazolam, Clazolimine, clebopride, Clemastine, Clentiazem Maleate, Clidinium Bromide, clinafloxacin, Clindamycin, Clioquinol, Clioxamide, Cliprofen, clobazam, Clobetasol Propionate, Clobetasone Butyrate, Clocortolone Acetate, Clodanolene, Clodazon Hydrochloride, clodronic acid, Clofazimine, Clofibrate, Clofilium Phosphate, Clogestone Acetate, Clomacran Phosphate, Clomegestone Acetate, Clometherone, clomethiazole, clomifene analogues, Clominorex, Clomiphene, Clomipramine Hydrochloride, Clonazepam, Clonidine, Clonitrate, Clonixeril, Clonixin, Clopamide, Clopenthixol, Cloperidone Hydrochloride, clopidogrel, Clopimozide, Clopipazan Mesylate, Clopirac, Cloprednol, Cloprostenol Sodium, Clorazepate Dipotassium, Clorethate, Clorexolone, Cloroperone Hydrochloride, Clorprenaline Hydrochloride, Clorsulon, Clortermine Hydrochloride, Closantel, Closiramine Aceturate, Clothiapine, Clothixamide Maleate Cloticasone Propionate, Clotrimazole, Cloxacillin Benzathine, Cloxyquin, Clozapine, Cocaine, Coccidioidin, Codeine, Codoxime, Colchicine, colestimide, Colestipol Hydrochloride, Colestolone, Colforsin, Colfosceril Palmitate, Colistimethate Sodium, Colistin Sulfate, collismycin A, collismycin B, Colterol Mesylate, combretastatin A4, combretastatin analogue, complestatin, conagenin, Conorphone Hydrochloride, contignasterol, contortrostatin, Cormethasone Acetate, Corticorelin Ovine Triflutate, Corticotropin, Cortisone Acetate, Cortivazol, Cortodoxone, cosalane, costatolide, Cosyntropin, cotinine, Coumadin, Coumermycin, crambescidin 816, Crilvastatin, crisnatol, Cromitrile Sodium, Cromolyn Sodium, Crotamiton, cryptophycin 8, cucumariosid, Cuprimyxin, curacin A, curdlan sulfate, curiosin, Cyclacillin, Cyclazocine, cyclazosin, cyclic HPMPC, Cyclindole, Cycliramine Maleate, Cyclizine, Cyclobendazole, cyclobenzaprine, cyclobut A, cyclobut G, cyclocapron, Cycloguanil Pamoate, Cycloheximide, cyclopentanthraquinones, Cyclopenthiazide, Cyclopentolate Hydrochloride, Cyclophenazine Hydrochloride, Cyclophosphamide, cycloplatam, Cyclopropane, Cycloserine, cyclosin, Cyclosporine, cyclothialidine, Cyclothiazide, cyclothiazomycin, Cyheptamide, cypemycin, Cypenamine Hydrochloride, Cyprazepam, Cyproheptadine Hydrochloride, Cyprolidol Hydrochloride, cyproterone, Cyproximide, Cysteamine, Cysteine Hydrochloride, Cystine, Cytarabine, Cytarabine Hydrochloride, cytarabine Ocfosfate, cytochalasin B, cytolytic factor, cytostatin, Dacarbazine, dacliximab, dactimicin, Dactinomycin, daidzein, Daledalin Tosylate, dalfopristin, Dalteparin Sodium, Daltroban, Dalvastatin, danaparoid, Danazol, Dantrolene, daphlnodorin A, dapiprazole, dapitant, Dapoxetine Hydrochloride, Dapsone, Daptomycin, Darglitazone Sodium, darifenacin, darlucin A, Darodipine, darsidomine, Daunorubicin Hydrochloride, Dazadrol Maleate, Dazepinil Hydrochloride, Dazmegrel, Dazopride Fumarate, Dazoxiben Hydrochloride, Debrisoquin Sulfate, Decitabine, deferiprone, deflazacort, Dehydrocholic Acid, dehydrodidemnin B, Dehydroepiandrosterone, delapril, Delapril Hydrochloride, Delavirdine Mesylate, delequamine, delfaprazine, Delmadinone Acetate, delmopinol, delphinidin, Demecarium Bromide, Demeclocycline, Demecycline, Demoxepam, Denofungin, deoxypyridinoline, Depakote, deprodone, Deprostil, depsidomycin, deramciclane, dermatan sulfate, Desciclovir, Descinolone Acetonide, Desflurane, Desipramine Hydrochloride, desirudin, Deslanoside, deslorelin, desmopressin, desogestrel, Desonide, Desoximetasone, desoxoamiodarone, Desoxycorticosterone Acetate, detajmium bitartrate, Deterenol Hydrochloride, Detirelix Acetate, Devazepide, Dexamethasone, Dexamisole, Dexbrompheniramine Maleate, Dexchlorpheniramine Maleate, Dexclamol Hydrochloride, Dexetimide, Dexfenfluramine Hydrochloride, dexifosfamide, Deximafen, Dexivacaine, dexketoprofen, dexloxiglumide, Dexmedetomidine, Dexormaplatin, Dexoxadrol Hydrochloride, Dexpanthenol, Dexpemedolac, Dexpropranolol Hydrochloride, Dexrazoxane, dexsotalol, dextrin 2-sulphate, Dextroamphetamine, Dextromethorphan, Dextrorphan Hydrochloride, Dextrothyroxine Sodium, dexverapamil, Dezaguanine, dezinamide, dezocine, Diacetolol Hydrochloride, Diamocaine Cyclamate, Diapamide, Diatrizoate Meglumine, Diatrizoic Acid, Diaveridine, Diazepam, Diaziquone, Diazoxide, Dibenzepin Hydrochloride, Dibenzothiophene, Dibucaine, Dichliorvos, Dichloralphenazone, Dichlorphenamide, Dicirenone, Diclofenac Sodium, Dicloxacillin, dicranin, Dicumarol, Dicyclomine Hydrochloride, Didanosine, didemnin B, didox, Dienestrol, dienogest, Diethylcarbamazine Citrate, diethylhomospermine, diethylnorspermine, Diethylpropion Hydrochloride, Diethylstilbestrol, Difenoximide Hydrochloride, Difenoxin, Diflorasone Diacetate, Difloxacin Hydrochloride, Difluanine Hydrochloride, Diflucortolone, Diflumidone Sodium, Diflunisal, Difluprednate, Diftalone, Digitalis, Digitoxin, Digoxin, Dihexyverine Hydrochloride, dihydrexidine, dihydro-5-azacytidine, Dihydrocodeine Bitartrate, Dihydroergotamine Mesylate, Dihydroestosterone, Dihydrostreptomycin Sulfate, Dihydrotachysterol, dihydrotaxol, 9-, Dilantin, Dilevalol Hydrochloride, Diltiazem Hydrochloride, Dimefadane, Dimefline Hydrochloride, Dimenhydrinate, Dimercaprol, Dimethadione, Dimethindene Maleate, Dimethisterone, dimethyl prostaglandin A1, Dimethyl Sulfoxide, dimethylhomospermine, dimiracetam, Dimoxamine Hydrochloride, Dinoprost, Dinoprostone, Dioxadrol Hydrochloride, dioxamycin, Diphenhydramine Citrate, Diphenidol, Diphenoxylate Hydrochloride, diphenyl spiromustine, Dipivefin Hydrochloride, Dipivefrin, dipliencyprone, diprafenone, dipropylnorspermine, Dipyridamole, Dipyrithione, Dipyrone, dirithromycin, discodermolide, Disobutamide, Disofenin, Disopyramide, Disoxaril, disulfuram, Ditekiren, Divalproex Sodium, Dizocilpine Maleate, Dobutamine, docarpamine, Docebenone, Docetaxel, Doconazole, docosanol, dofetilide, dolasetron, Ebastine, ebiratide, ebrotidine, ebselen, ecabapide, ecabet, ecadotril, ecdisteron, echicetin, echistatin, Echothiophate Iodide, Eclanamine Maleate, Eclazolast, ecomustine, Econazole, ecteinascidin 722, edaravone, Edatrexate, edelfosine, Edifolone Acetate, edobacomab, Edoxudine, edrecolomab, Edrophonium Chloride, edroxyprogesteone Acetate, efegatran, eflornithine, efonidipine, egualcen, Elantrine, eleatonin, elemene, eletriptan, elgodipine, eliprodil, Elsamitrucin, eltenae, Elucaine, emalkalim, emedastine, Emetine Hydrochloride, emiglitate, Emilium Tosylate, emitefur, emoctakin, Enadoline Hydrochloride, enalapril, Enalaprilat, Enalkiren, enazadrem, Encyprate, Endralazine Mesylate, Endrysone, Enflurane, englitazone, Enilconazole, Enisoprost, Enlimomab, Enloplatin, Enofelast, Enolicam Sodium, Enoxacin, enoxacin, enoxaparin sodium, Enoxaparin Sodium, Enoximone, Enpiroline Phosphate, Enprofylline, Enpromate, entacapone, enterostatin, Enviradene, Enviroxime, Ephedrine, Epicillin, Epimestrol, Epinephrine, Epinephryl Borate, Epipropidine, Epirizole, epirubicin, Epitetracycline Hydrochloride, Epithiazide, Epoetin Alfa, Epoetin Beta, Epoprostenol, Epoprostenol Sodium, epoxymexrenone, epristeride, Eprosartan, eptastigmine, equilenin, Equilin, Erbulozole, erdosteine, Ergoloid Mesylates, Ergonovine Maleate, Ergotamine Tartrate, ersentilide, Ersofermin, erythritol, Erythrityl Tetranitrate, Erythromycin, Esmolol Hydrochloride, Esorubicin Hydrochloride, Esproquin Hydrochloride, Estazolam, Estradiol, Estramustine, estramustine analogue, Estrazinol Hydrobromide, Estriol, Estrofurate, estrogen agonists, estrogen antagonists, Estrogens, Conjugated, Estrogens, Esterified, Estrone, Estropipate, esuprone, Etafedrine Hydrochloride, Etanidazole, etanterol, Etarotene, Etazolate Hydrochloride, Eterobarb, ethacizin, Ethacrynate Sodium, Ethacrynic Acid, Ethambutol Hydrochloride, Ethamivan, Ethanolamine Oleate, Ethehlorvynol, Ether, Ethinyl estradiol, Ethiodized Oil, Ethionamide, Ethonam Nitrate, Ethopropazine Hydrochloride, Ethosuximide, Ethotoin, Ethoxazene Hydrochloride, Ethybenztropine, Ethyl Chloride, Ethyl Dibunate, Ethylestrenol, Ethyndiol, Ethynerone, Ethynodiol Diacetate, Etibendazole, Etidocaine, Etidronate Disodium, Etidronic Acid, Etifenin, Etintidine Hydrochloride, etizolam, Etodolac, Etofenamate, Etoformin Hydrochloride, Etomidate, Etonogestrel, Etoperidone Hydrochloride, Etoposide, Etoprine, Etoxadrol Hydrochloride, Etozolin, etrabamine, Etretinate, Etryptamine Acetate, Eucatropine Hydrochloride, Eugenol, Euprocin Hydrochloride, eveminomicin, Exametazime, examorelin, Exaprolol Hydrochloride, exemestane, fadrozole, faeriefungin, Famciclovir, Famotidine, Fampridine, fantofarone, Fantridone Hydrochloride, faropenem, fasidotril, fasudil, fazarabine, fedotozine, felbamate, Felbinac, Felodipine, Felypressin, Fenalamide, Fenamole, Fenbendazole, Fenbufen, Fencibutirol, Fenclofenac, Fenclonine, Fenclorac, Fendosal, Fenestrel, Fenethylline Hydrochloride, Fenfluramine Hydrochloride, Fengabine, Fenimide, Fenisorex, Fenmetozole Hydrochloride, Fenmetramide, Fenobam, Fenoctimine Sulfate, fenofibrate, fenoldopam, Fenoprofen, Fenoterol, Fenpipalone, Fenprinast Hydrochloride, Fenprostalene, Fenquizone, fenretinide, fenspiride, Fentanyl Citrate, Fentiazac, Fenticlor, fenticonazole, Fenyripol Hydrochloride, fepradinol, ferpifosate sodium, ferristene, ferrixan, Ferrous Sulfate, Dried, Ferumoxides, ferumoxsil, Fetoxylate Hydrochloride, fexofenadine, Fezolamine Fumarate, Fiacitabine, Fialuridine, Fibrinogen I 125, filgrastim, Filipin, finasteride, Flavodilol Maleate, flavopiridol, Flavoxate Hydrochloride, Flazalone, flecamide, flerobuterol, Fleroxacin, flesinoxan, Flestolol Sulfate, Fletazepam, flezelastine, flobufen, Floctafenine, flomoxef, Flordipine, florfenicol, florifenine, flosatidil, Flosequinan, Floxacillin, Floxuridine, fluasterone, Fluazacort, Flubanilate Hydrochloride, Flubendazole, Flucindole, Flucloronide, Fluconazole, Flucytosine, Fludalanine, Fludarabine Phosphate, Fludazonium Chloride, Fludeoxyglucose F 18, Fludorex, Fludrocortisone Acetate, Flufenamic Acid, Flufenisal, Flumazenil, flumecinol, Flumequine, Flumeridone, Flumethasone, Flumetramide, Flumezapine, Fluminorex, Flumizole, Flumoxonide, flunarizine, Flunidazole, Flunisolide, Flunitrazepam, Flunixin, fluocalcitriol, Fluocinolone Acetonide, Fluocinonide, Fluocortin Butyl, Fluocortolone, Fluorescein, fluorodaunorunicin hydrochloride, Fluorodopa F 18, Fluorometholone, Fluorouracil, Fluotracen Hydrochloride, Fluoxetine, Fluoxymesterone, fluparoxan, Fluperamide, Fluperolone Acetate, Fluphenazine Decanoate, flupirtine, Fluprednisolone, Fluproquazone, Fluprostenol Sodium, Fluquazone, Fluradoline Hydrochloride, Flurandrenolide, Flurazepam Hydrochloride, Flurbiprofen, Fluretofen, flurithromycin, Fluorocitabine, Fluorofamide, Fluorogestone Acetate, Fluorothyl, Fluoroxene, Fluspiperone, Fluspirilene, Fluticasone Propionate, flutrimazole, Flutroline, fluvastatin, Fluvastatin Sodium, fluvoxamine, Fluzinamide, Folic Acid, Follicle regulatory protein, Folliculostatin, Fomepizole, Fonazine Mesylate, forasartan, forfenimex, forfenirmex, formestane, Formocortal, formoterol, Fosarilate, Fosazepam, Foscarnet Sodium, fosfomycin, Fosfonet Sodium, fosinopril, Fosinoprilat, fosphenyloin, Fosquidone, Fostedil, fostriecin, fotemustine, Fuchsin, Basic, Fumoxicillin, Fungimycin, Furaprofen, Furazolidone, Furazolium Chloride, Furegrelate Sodium, Furobufen, Furodazole, Furosemide, Fusidate Sodium, Fusidic Acid, gabapentin, Gadobenate Dimeglumine, gadobenic acid, gadobutrol, Gadodiamide, gadolinium texaphyrin, Gadopentetate Dimegiumine, gadoteric acid, Gadoteridol, Gadoversetamide, galantamine, galdansetron, Galdansetron Hydrochloride, Gallamine Triethiodide, gallium nitrate, gallopamil, galocitabine, Gamfexine, gamolenic acid, Ganciclovir, ganirelix, gelatinase inhibitors, Gemcadiol, Gemcitabine, Gemeprost, Gemfibrozil, Gentamicin Sulfate, Gentian Violet, gepirone, Gestaclone, Gestodene, Gestonorone Caproate, Gestrinone, Gevotroline Hydrochloride, girisopam, glaspimod, glaucocalyxin A, Glemanserin, Gliamilide, Glibornuride, Glicetanile Sodium, Gliflumide, Glimepiride, Glipizide, Gloximonam, Glucagon, glutapyrone, glutathione inhibitors, Glutethimide, Glyburide, glycopine, glycopril, Glycopyrrolate, Glyhexamide, Glymidine Sodium, Glyoctamide, Glyparamide, Gold Au 198, Gonadoctrinins, Gonadorelin, Gonadotropins, Goserelin, Gramicidin, Granisetron, grepafloxacin, Griseofulvin, Guaiapate, Guaithylline, Guanabenz, Guanabenz Acetate, Guanadrel Sulfate, Guancydine, Guanethidine Monosulfate, Guanfacine Hydrochloride, Guanisoquin Sulfate, Guanoclor Sulfate, Guanoctine Hydrochloride, Guanoxabenz, Guanoxan Sulfate, Guanoxyfen Sulfate, Gusperimus Trihydrochloride, Halazepam, Halcinonide, halichondrin B, Halobetasol Propionate, halofantrine, Halofantrine Hydrochloride, Halofenate, Halofuginone Hydrobromide, halomon, Halopemide, Haloperidol, halopredone, Haloprogesterone, Haloprogin, Halothane, Halquinols, Hamycin, Han memopausal gonadotropins, hatomamicin, hatomarubigin A, hatomarubigin B, hatomarubigin C, hatomarubigin D, Heparin Sodium, hepsulfam, heregulin, Hetacillin, Heteronium Bromide, Hexachlorophene:Hydrogen Peroxide, Hexafluorenium Bromide, hexamethylene bisacetamide, Hexedine, Hexobendine, Hexoprenaline Sulfate, Hexylresorcinol, Histamine Phosphate, Histidine, Histoplasmin, Histrelin, Homatropine Hydrobromide, Hoquizil Hydrochloride, Human chorionic gonadotropin, Hycanthone, Hydralazine Hydrochloride, Hydralazine Polistirex, Hydrochlorothiazide, Hydrocodone Bitartrate, Hydrocortisone, Hydroflumethiazide, Hydromorphone Hydrochloride, Hydroxyamphetamine Hydrobromide, Hydroxychloroquine Sulfate, Hydroxyphenamate, Hydroxyprogesterone Caproate, Hydroxyurca, Hydroxyzine Hydrochloride, Hymecromone, Hyoscyamine, hypericin, Ibafloxacin, ibandronic acid, ibogaine, Ibopamine, ibudilast, Ibufenac, Ibuprofen, Ibutilide Fumarate, Icatibant Acetate, Ichthammol, Icotidine, idarubicin, idoxifene, Idoxuridine, idramantone, lemefloxacin, lesopitron, Ifetroban, Ifosfamide, Ilepeimide, illimaquinone, ilmofosine, ilomastat, Ilonidap, iloperidone, iloprost, Imafen Hydrochloride, Imazodan Hydrochloride, imidapril, imidazenil, imidazoacridones, Imidecyl Iodine, Imidocarb Hydrochloride, Imidoline Hydrochloride, Imidurea, Imiloxan Hydrochloride, Imipenem, Imipramine Hydrochloride, imiquimod, immunostimulant peptides, Impromidine Hydrochloride, Indacrinone, Indapamide, Indecamide Hydrochloride, Indeloxazine Hydrochloride, Indigotindisulfonate Sodium, indinavir, Indocyanine Green, Indolapril Hydrochloride, Indolidan, indometacin, Indomethacin Sodium, Indoprofen, indoramin, Indorenate Hydrochloride, Indoxole, Indriline Hydrochloride, inocoterone, inogatran, inolimomab, Inositol Niacinate, Insulin, interferons, interleukins, Intrazole, Intriptyline Hydrochloride, iobenguane, Iobenzamic Acid, iobitridol, locarmate Meglumine, locarmic Acid, locetamic Acid, lodamide, Iodine, Iodipamide Meglumine, Iodixanol, iodoamiloride, Iodoantipyrine I 131, lodocholesterol I 131, iododoxorubicin, Iodohippurate Sodium I 131, lodopyracet I 125, Iodoquinol, lodoxamate Meglumine, Iodoxamie Acid, loglicic Acid, lofetamine Hydrochloride I 123, iofratol, loglucol, loglucomide, loglycamic Acid, logulamide, Iohexyl, iomeprol, Iomethin I 125, lopamidol, lopanoic Acid, iopentol, lophendylate, loprocemic Acid, iopromide, lopronic Acid, Iopydol, Iopydone, iopyrol, losefamic Acid, loseric Acid, losulamide Meglumine, losumetic Acid, lotasul, lotetric Acid, lothalamate Sodium, lothalamic Acid, iotriside, lotrolan, lotroxic Acid, lotyrosine I 131, loversol, Ioxagiate Sodium, Ioxaglate Meglumine, Ioxaglic Acid, ioxilan, Ioxotrizoic Acid, ipazilide, ipenoxazone, ipidacrine, Ipodate Calcium, ipomeanol, 4-, Ipratropium Bromide, ipriflavone, Iprindole, Iprofenin, Ipronidazole, Iproplatin, Iproxamine Hydrochloride, ipsapirone, irbesartan, irinotecan, irloxacin, iroplact, irsogladine, Irtemazole, isalsteine, Isamoxole, isbogrel, Isepamicin, isobengazole, Isobutamben, Isocarboxazid, Isoconazole, Isoetharine, isofloxythepin, Isoflupredone Acetate, Isoflurane, Isofluorophate, isohomohalicondrin B, Isoleucine, Isomazole Hydrochloride, Isomylamine Hydrochloride, Isoniazid, Isopropamide Iodide, Isopropyl Alcohol, isopropyl unoprostone, Isoproterenol Hydrochloride, Isosorbide, Isosorbide Mononitrate, Isotiquimide, Isotretinoin, Isoxepac, Isoxicam, Isoxsuprine Hydrochloride, isradipine, itameline, itasetron, Itazigrel, itopride, Itraconazole, Ivermectin, jasplakinolide, Josamycin, kahalalide F, Kalafungin, Kanamycin Sulfate, Ketamine Hydrochloride, Ketanserin, Ketazocine, Ketazolam, Kethoxal, Ketipramine Fumarate, Ketoconazole, Ketoprofen, Ketorfanol, ketorolac, Ketotifen Fumarate, Kitasamycin, Labetalol Hydrochloride, Lacidipine, lacidipine, lactitol, lactivicin, laennec, lafutidine, lamellarin-N triacetate, lamifiban, Lamivudine, Lamotrigine, lanoconazole, Lanoxin, lanperisone, lanreotide, Lansoprazole, latanoprost, lateritin, laurocapram, Lauryl Isoquinolinium Bromide, Lavoltidine Succinate, lazabemide, Lecimibide, leinamycin, lemildipine, leminoprazole, lenercept, Leniquinsin, lenograstim, Lenperone, lentinan sulfate, leptin, leptolstatin, lercanidipine, Lergotrile, lerisetron, Letimide Hydrochloride, letrazuril, letrozole, Leucine, leucomyzin, Leuprolide Acetate, leuprolide+estrogen+progesterone-, leuprorelin, Levamfetamine Succinate, levamisole, Levdobutamine Lactobionate, Leveromakalim, levetiracetam, Leveycloserine, levobetaxolol, levobunolol, levobupivacaine, levocabastine, levocarnitine, Levodopa, levodropropizine, levofloxacin, Levofuraltadone, Levoleucovorin Calcium, Levomethadyl Acetate, Levomethadyl Acetate Hydrochloride, levomoprolol, Levonantradol Hydrochloride, Levonordefrin, Levonorgestrel, Levopropoxyphene Napsylate, Levopropylcillin Potassium, levormeloxifene, Levorphanol Tartrate, levosimendan, levosulpiride, Levothyroxine Sodium, Levoxadrol Hydrochloride, Lexipafant, Lexithromycin, liarozole, Libenzapril, Lidamidine Hydrochloride, Lidocaine, Lidofenin, Lidoflazine, Lifarizine, Lifibrate, Lifibrol, Linarotene, Lincomycin, linear polyamine analogue, Linogliride, Linopirdine, linotroban, linsidomine, lintitript, lintopride, Liothyronine I 125, liothyronine sodium, Liotrix, lirexapride, lisinopril, lissoclinamide 7, Lixazinone Sulfate, lobaplatin, Lobenzarit Sodium, Lobucavir, Lodelaben, lodoxamide, Lofemizole Hydrochloride, Lofentanil Oxalate, Lofepramine Hydrochloride, Lofexidine Hydrochloride, lombricine, Lomefloxacin, lomerizine, Lometraline Hydrochloride, lometrexol, Lomofungin, Lomoxicam, Lomustine, Lonapalene, lonazolac, lonidamine, Loperamide Hydrochloride, loracarbef, Lorajmine Hydrochloride, loratadine, Lorazepam, Lorbamate, Lorcamide Hydrochloride, Loreclezole, Loreinadol, lorglumide, Lormetazepam, Lornoxicam, lornoxicam, Lortalamine, Lorzafone, losartan, losigamone, losoxantrone, Losulazine Hydrochloride, loteprednol, lovastatin, loviride, Loxapine, Loxoribine, lubeluzole, Lucanthone Hydrochloride, Lufironil, Lurosetron Mesylate, lurtotecan, luteinizing hormone, lutetium, Lutrelin Acetate, luzindole, Lyapolate Sodium, Lycetamine, lydicamycin, Lydimycin, Lynestrenol, Lypressin, Lysine, lysofylline, lysostaphin, lytic peptides, Maduramicin, Mafenide, magainin 2 amide, Magnesium Salicylate, Magnesium Sulfate, magnolol, maitansine, Malethamer, mallotochromene, mallotojaponin, Malotilate, malotilate, mangafodipir, manidipine, maniwamycin A, Mannitol, mannostatin A, manumycin E, manumycin F, mapinastine, Maprotiline, marimastat, Martek 158708, Martek 92211, Masoprocol, maspin, massetolide, matrilysin inhibitors, Maytansine, Mazapertine Succiniate, Mazindol, Mebendazole, Mebeverine Hydrochloride, Mebrofenin, Mebutamate, Mecamylamine Hydrochloride, Mechlorethamine Hydrochloride, Meclocycline, Meclofenamate Sodium, Mecloqualone, Meclorisone Dibutyrate, Medazepam Hydrochloride, Medorinone, Medrogestone, Medroxalol, Medroxyprogesterone, Medrysone, Meelizine Hydrochloride, Mefenamic Acid, Mefenidil, Mefenorex Hydrochloride, Mefexamide, Mefloquine Hydrochloride, Mefruside, Megalomicin Potassium Phosphate, Megestrol Acetate, Meglumine, Meglutol, Melengestrol Acetate, Melitracen Hydrochloride, Melphalan, Memotine Hydrochloride, Menabitan Hydrochloride, Menoctone, menogaril, Menotropins, Meobentine Sulfate, Mepartricin, Mepenzolate Bromide, Meperidine Hydrochloride, Mephentermine Sulfate, Mephenyloin, Mephobarbital, Mepivacaine Hydrochloride, Meprobamate, Meptazinol Hydrochloride, Mequidox, Meralein Sodium, merbarone, Mercaptopurine, Mercufenol Chloride, Mercury, Ammoniated, Merisoprol Hg 197, Meropenem, Mesalamine, Meseclazone, Mesoridazine, Mesterolone, Mestranol, Mesuprine Hydrochloride, Metalol Hydrochloride, Metaproterenol Polistirex, Metaraminol Bitartrate, Metaxalone, Meteneprost, meterelin, Metformin, Methacholine Chloride, Methacycline, Methadone Hydrochloride, Methadyl Acetate, Methalthiazide, Methamphetamine Hydrochloride, Methaqualone, Methazolamide, Methdilazine, Methenamine, Methenolone Acetate, Methetoin, Methicillin Sodium, Methimazole, methioninase, Methionine, Methisazone, Methixene Hydrochloride, Methocarbamol, Methohexital Sodium, Methopholine, Methotrexate, Methotrimeprazine, methoxatone, Methoxyflurane, Methsuximide, Methyclothiazide, Methyl 10 Palmoxirate, Methylatropine Nitrate, Methylbenzethonium Chloride, Methyldopa, Methyldopate Hydrochloride, Methylene Blue, Methylergonovine Maleate, methylhistamine, R-alpha, methylinosine monophosphate, Methylphenidate Hydrochloride, Methylprednisolone, Methyltestosterone, Methynodiol Diacelate, Methysergide, Methysergide Maleate, Metiamide, Metiapine, Metioprim, metipamide, Metipranolol, Metizoline Hydrochloride, Metkephamid Acetate, metoclopramide, Metocurine Iodide, Metogest, Metolazone, Metopimazine, Metoprine, Metoprolol, Metoquizine, Metrifonate, Metrizamide, Metrizoate Sodium, Metronidazole, Meturedepa, Metyrapone, Metyrosine, Mexiletine Hydrochloride, Mexrenoate Potassium, Mezlocillin, mfonelic Acid, Mianserin Hydrochloride, mibefradil, Mibefradil Dihydrochloride, Mibolerone, michellamine B, Miconazole, microcolin A, Midaflur, Midazolam Hydrochloride, midodrine, mifepristone, Mifobate, miglitol, milacemide, milameline, mildronate, Milenperone, Milipertine, milnacipran, Milrinone, miltefosine, Mimbane Hydrochloride, minaprine, Minaxolone, Minocromil, Minocycline, Minoxidil, Mioflazine Hydrochloride, miokamycin, mipragoside, mirfentanil, mirimostim, Mirincamycin Hydrochloride, Mirisetron Maleate, Mirtazapine, mismatched double stranded RNA, Misonidazole, Misoprostol, Mitindomide, Mitocarcin, Mitocromin, Mitogillin, mitoguazone, mitolactol, Mitomalcin, Mitomycin, mitonafide, Mitosper, Mitotane, mitoxantrone, mivacurium chloride, mivazerol, mixanpril, Mixidine, mizolastine, mizoribine, Moclobemide, modafinil, Modaline Sulfate, Modecamide, moexipril, mofarotene, Mofegiline Hydrochloride, mofezolac, molgramostim, Molinazone, Molindone Hydrochloride, Molsidomine, mometasone, Monatepil Maleate, Monensin, Monoctanoin, Montelukast Sodium, montirelin, mopidamol, moracizine, Morantel Tartrate, Moricizine, Morniflumate, Morphine Sulfate, Morrhuate Sodium, mosapramine, mosapride, motilide, Motretinide, Moxalactam Disodium, Moxazocine, moxiraprine, Moxnidazole, moxonidine, Mumps Skin Test Antigen, mustard anticancer agent, Muzolimine, mycaperoxide B, Mycophenolic Acid, myriaporone, Nabazenil, Nabilone, Nabitan Hydrochloride, Naboctate Hydrochloride, Nabumetone, N-acetyldinaline, Nadide, nadifloxacin, Nadolol, nadroparin calcium, nafadotride, nafamostat, nafarelin, Nafcillin Sodium, Nafenopin, Nafimidone Hydrochloride, Naflocort, Nafomine Malate, Nafoxidine Hydrochloride, Nafronyl Oxalate, Naftifine Hydrochloride, naftopidil, naglivan, nagrestip, Nalbuphine Hydrochloride, Nalidixate Sodium, Nalidixic Acid, nalmefene, Nalmexone Hydrochloride, naloxone+pentazocine, Naltrexone, Namoxyrate, Nandrolone Phenpropionate, Nantradol Hydrochloride, Napactadine Hydrochloride, napadisilate, Napamezole Hydrochloride, napaviin, Naphazoline Hydrochloride, naphterpin, Naproxen, Naproxol, napsagatran, Naranol Hydrochloride, Narasin, naratriptan, nartograstim, nasaruplase, Natamycin, nateplase, Naxagolide Hydrochloride, Nebivolol, Nebramycin, nedaplatin, Nedocromil, Nefazodone Hydrochloride, Neflumozide Hydrochloride, Nefopam Hydrochloride, Nelezaprine Maleate, Nemazoline Hydrochloride, nemorubicin, Neomycin Palmitate, Neostigmine Bromide, neridronic acid, Netilmicin Sulfate, neutral endopeptidase, Neutramycin, Nevirapine, Nexeridine Hydrochloride, Niacin, Nibroxane, Nicardipine Hydrochloride, Nicergoline, Niclosamide, Nicorandil, Nicotinyl Alcohol, Nifedipine, Nifirmerone, Nifluridide, Nifuradene, Nifuraldezone, Nifuratel, Nifuratrone, Nifurdazil, Nifurimide, Nifurpirinol, Nifurquinazol, Nifurthiazole, nilutamide, Nilvadipine, Nimazone, Nimodipine, niperotidine, niravoline, Niridazole, nisamycin, Nisbuterol Mesylate, nisin, Nisobamate, Nisoldipine, Nisoxetine, Nisterime Acetate, Nitarsone, nitazoxamide, nitecapone, Nitrafudam Hydrochloride, Nitralamine Hydrochloride, Nitramisole Hydrochloride, Nitrazepam, Nitrendipine, Nitrocycline, Nitrodan, Nitrofurantoin, Nitrofurazone, Nitroglycerin, Nitromersol, Nitromide, Nitromifene Citrate, Nitrous Oxide, nitroxide antioxidant, nitrullyn, Nivazol, Nivimedone Sodium, Nizatidine, Noberastine, Nocodazole, Nogalamycin, Nolinium Bromide, Nomifensine Maleate, Noracymethadol Hydrochloride, Norbolethone, Norepinephrine Bitartrate, Norethindrone, Norethynodrel, Norfloxacin, Norflurane, Norgestimate, Norgestomet, Norgestrel, Nortriptyline Hydrochloride, Noscapine, Novobiocin Sodium, N-substituted benzaimides, Nufenoxole, Nylestriol, Nystatin, O6-benzylguanine, Obidoxime Chloride, Ocaperidone, Ocfentanil Hydrochloride, Ocinaplon, Octanoic Acid, Octazamide, Octenidine Hydrochloride, Octodrine, Octreotide, Octriptyline Phosphate, Ofloxacin, Oformine, okicenone, Olanzapine, oligonucleotides, olopatadine, olprinone, olsalazine, Olsalazine Sodium, Olvanil, omeprazole, onapristone, ondansetron, Ontazolast, Oocyte maturation inhibitor, Opipramol Hydrochloride, oracin, Orconazole Nitrate, Orgotein, Orlislat, Ormaplatin, Ormetoprim, Ornidazole, Orpanoxin, Orphenadrine Citrate, osaterone, otenzepad, Oxacillin Sodium, Oxagrelate, oxaliplatin, Oxamarin Hydrochloride, oxamisole, Oxamniquine, oxandrolone, Oxantel Pamoate, Oxaprotiline Hydrochloride, Oxaprozin, Oxarbazole, Oxatomide, oxaunomycin, Oxazepam, oxcarbazepine, Oxendolone, Oxethazaine, Oxetorone Fumarate, Oxfendazole, Oxfenicine, Oxibendazole, oxiconazole, Oxidopamine, Oxidronic Acid, Oxifungin Hydrochloride, Oxilorphan, Oximonam, Oximonam Sodium, Oxiperomide, oxiracetam, Oxiramide, Oxisuran, Oxmetidine Hydrochloride, oxodipine, Oxogestone Phenpropionate, Oxolinic Acid, Oxprenolol Hydrochloride, Oxtriphylline, Oxybutynin Chloride, Oxychlorosene, Oxycodone, Oxymetazoline Hydrochloride, Oxymetholone, Oxymorphone Hydrochloride, Oxypertine, Oxyphenbutazone, Oxypurinol, Oxytetracycline, Oxytocin, ozagrel, Ozolinone, Paclitaxel, palauamine, Paldimycin, palinavir, palmitoylrhizoxin, Palmoxirate Sodium, pamaqueside, Pamatolol Sulfate, pamicogrel, Pamidronate Disodium, pamidronic acid, Panadiplon, panamesine, panaxytriol, Pancopride, Pancuronium Bromide, panipenem, pannorin, panomifene, pantethine, pantoprazole, Papaverine Hydrochloride, parabactin, Parachlorophenol, Paraldehyde, Paramethasone Acetate, Paranyline Hydrochloride, Parapenzolate Bromide, Pararosaniline Pamoate, Parbendazole, Parconazole Hydrochloride, Paregoric, Pareptide Sulfate, Pargyline Hydrochloride, parnaparin sodium, Paromomycin Sulfate, Paroxetine, parthenolide, Partricin, Paulomycin, pazelliptine, Pazinaclone, Pazoxide, pazufloxacin, pefloxacin, pegaspargase, Pegorgotein, Pelanserin Hydrochloride, peldesine, Peliomycin, Pelretin, Pelrinone Hydrochloride, Pemedolac, Pemerid Nitrate, pemirolast, Pemoline, Penamecillin, Penbutolol Sulfate, Penciclovir, Penfluridol, Penicillin G Benzathine, Penicillin G Potassium, Penicillin G Procaine, Penicillin G Sodium, Penicillin V, Penicillin V Benzathine, Penicillin V Hydrabamine, Penicillin V Potassium, Pentabamate, Pentaerythritol Tetranitrate, pentafuside, pentamidine, pentamorphone, Pentamustine, Pentapiperium Methylsulfate, Pentazocine, Pentetic Acid, Pentiapine Maleate, pentigetide, Pentisomicin, Pentizidone Sodium, Pentobarbital, Pentomone, Pentopril, pentosan, pentostatin, Pentoxifylline, Pentrinitrol, pentrozole, Peplomycin Sulfate, Pepstatin, perflubron, perfofamide, Perfosfamide, pergolide, Perhexyline Maleate, perillyl alcohol, Perindopril, perindoprilat, Perlapine, Permethrin, perospirone, Perphenazine, Phenacemide, phenaridine, phenazinomycin, Phenazopyridine Hydrochloride, Phenbutazone Sodium Glycerate, Phencarbamide, Phencyclidine Hydrochloride, Phendimetrazine Tartrate, Phenelzine Sulfate, Phenmetrazine Hydrochloride, Phenobarbital, Phenoxybenzamine Hydrochloride, Phenprocoumon, phenserine, phensuccinal, Phensuximide, Phentermine, Phentermine Hydrochloride, phentolamine mesilate, Phentoxifylline, Phenyl Aminosalicylate, phenylacetate, Phenylalanine, phenylalanyl ketoconazole, Phenylbutazone, Phenylephrine Hydrochloride, Phenylpropanolamine Hydrochloride, Phenylpropanolamine Polistirex, Phenyramidol Hydrochloride, Phenyloin, phosphatase inhibitors, Physostigmine, picenadol, picibanil, Picotrin Diolamine, picroliv, picumeterol, pidotimod, Pifamine, Pilocarpine, pilsicamide, pimagedine, Pimetine Hydrochloride, pimilprost, Pimobendan, Pimozide, Pinacidil, Pinadoline, Pindolol, pinnenol, pinocebrin, Pinoxepin Hydrochloride, pioglitazone, Pipamperone, Pipazethate, pipecuronium bromide, Piperacetazine, Piperacillin Sodium, Piperamide Maleate, piperazine, Pipobroman, Piposulfan, Pipotiazine Palmitate, Pipoxolan Hydrochloride, Piprozolin, Piquindone Hydrochloride, Piquizil Hydrochloride, Piracetam, Pirandamine Hydrochloride, pirarubicin, Pirazmonam Sodium, Pirazolac, Pirbenicillin Sodium, Pirbuterol Acetate, Pirenperone, Pirenzepine Hydrochloride, piretanide, Pirfenidone, Piridicillin Sodium, Piridronate Sodium, Piriprost, piritrexim, Pirlimycin Hydrochloride, pirlindole, pirmagrel, Pirmenol Hydrochloride, Pirnabine, Piroctone, Pirodavir, pirodomast, Pirogliride Tartrate, Pirolate, Pirolazamide, Piroxantrone Hydrochloride, Piroxicam, Piroximone, Pirprofen, Pirquinozol, Pirsidomine, Prenylamine, Pituitary, Posterior, Pivampicillin Hydrochloride, Pivopril, Pizotyline, placetin A, platinum compounds, platinum-triamine complex, Plicamycin, Plomestane, Pobilukast Edamine, Podofilox, Poisonoak Extract, Poldine Methylsulfate, Poliglusam, Polignate Sodium, Polymyxin B Sulfate, Polythiazide, Ponalrestat, Porfimer Sodium, Porfiromycin, Potassium Chloride, Potassium Iodide, Potassium Permanganate, Povidone-lodine, Practolol, Pralidoxime Chloride, Pramiracetam Hydrochloride, Pramoxine Hydrochloride, Pranolium Chloride, Pravadoline Maleate, Pravastatin (Pravachol), Prazepam, Prazosin, Prazosin Hydrochloride, Prednazate, Prednicarbate, Prednimustine, Prednisolone, Prednisone, Prednival, Pregnenolone Succiniate, Prenalterol Hydrochloride, Pridefine Hydrochloride, Prifelone, Prilocalne Hydrochloride, Prilosec, Primaquine Phosphate, Primidolol, Primidone, Prinivil, prinomide Tromethamine, Prinoxodan, Prizidilol Hydrochloride, Proadifen Hydrochloride, Probenecid, Probicromil Calcium, Probucol, Procainamide Hydrochloride, Procaine Hydrochloride, Procarbazine Hydrochloride, Procaterol Hydrochloride, Prochlorperazine, Procinonide, Proclonol, Procyclidine Hydrochloride, Prodilidine Hydrochloride, Prodolic Acid, Profadol Hydrochloride, Progabide, Progesterone, Proglumide, Proinsulin Human, Proline, Prolintane Hydrochloride, Promazine Hydrochloride, Promethazine Hydrochloride, Propafenone Hydrochloride, propagermanium, Propanidid, Propantheline Bromide, Proparacaine Hydrochloride, Propatyl Nitrate, propentofylline, Propenzolate Hydrochloride, Propikacin, Propiomazine, Propionic Acid, propionylcarnitine, L-, propiram, propiram+paracetamol, propiverine, Propofol, Propoxycaine Hydrochloride, Propoxyphene Hydrochloride, Propranolol Hydrochloride, Propulsid, propyl bis-acridone, Propylhexedrine, Propyliodone, Propylthiouracil, Proquazone, Prorenoate Potassium, Proroxan Hydrochloride, Proscillaridin, Prostalene, prostratin, Protamine Sulfate, protegrin, Protirelin, protosufloxacin, Protriptyline Hydrochloride, Proxazole, Proxazole Citrate, Proxicromil, Proxorphan Tartrate, prulifloxacin, Pseudoephedrine Hydrochloride, Puromycin, purpurins, Pyrabrom, Pyrantel, Pamoate, Pyrazinamide, Pyrazofurin, pyrazoloacridine, Pyridostigmine Bromide, Pyrilamine Maleate, Pyrimethamine, Pyrinoline, Pyrithione Sodium, Pyrithione Zinc, Pyrovalerone Hydrochloride, Pyroxamine Maleate, Pyrrocaine, Pyrroliphene Hydrochloride, Pyrrolnitrin, Pyrvinium Pamoate, Quadazocine Mesylate, Quazepam, Quazinone, Quazodine, Quazolast, quetiapine, quiflapon, quinagolide, Quinaldine Blue, quinapril, Quinaprilat, Quinazosin Hydrochloride, Quinbolone, Quinctolate, Quindecamine Acetate, Quindonium Bromide, Quinelorane Hydrochloride, Quinestrol, Quinfamide, Quingestanol Acetate, Quingestrone, Quinidine Gluconate, Quinielorane Hydrochloride, Quinine Sulfate, Quinpirole Hydrochloride, Quinterenol Sulfate, Quinuclium Bromide, Quinupristin, Quipazine Maleate, Rabeprazole Sodium, Racephenicol, Racepinephrine, raf antagonists, Rafoxamide, Ralitoline, raloxifene, raltitrexed, ramatroban, Ramipril, Ramoplanin, ramosetron, ranelic acid, Ranimycin, Ranitidine, ranolazine, Rauwolfia Serpentina, recainam, Recainam Hydrochloride, Reclazepam, regavirumab, Regramostim, Relaxin, Relomycin, Remacemide Hydrochloride, Remifentanil Hydrochloride, Remiprostol, Remoxipride, Repirinast, Repromicin, Reproterol Hydrochloride, Reserpine, resinferatoxin, Resorcinol, retelliptine demethylated, reticulon, reviparin sodium, revizinone, rhenium Re 186 etidronate, rhizoxin, Ribaminol, Ribavirin, Riboprine, ribozymes, ricasetron, Ridogrel, Rifabutin, Rifametane, Rifamexil, Rifamide, Rifampin, Rifapentine, Rifaximin, retinamide, rilopirox, Riluzole, rimantadine, Rimcazole Hydrochloride, Rimexolone, Rimiterol Hydrobromide, rimoprogin, riodipine, Rioprostil, Ripazepam, ripisartan, Risedronate Sodium, risedronic acid, Risocaine, Risotilide Hydrochloride, rispenzepine, Risperdal, Risperidone, Ritanserin, ritipenem, Ritodrine, Ritolukast, ritonavir, rizatriptan benzoate, Rocastine Hydrochloride, Rocuronium Bromide, Rodocaine, Roflurane, Rogletimide, rohitukine, rokitamycin, Roletamicide, Rolgamidine, Rolicyprine, Rolipram, Rolitetracycline, Rolodine, Romazarit, romurtide, Ronidazole, ropinirole, Ropitoin Hydrochloride, ropivacaine, Ropizine, roquinimex, Rosaramicin, Rosoxacin, Rotoxamine, roxaitidine, Roxarsone, roxindole, roxithromycin, rubiginone Bi, ruboxyl, rufloxacin, rupatidine, Rutamycin, ruzadolane, Sabeluzole, safingol, safironil, saintopin, salbutamol, R—, Salcolex, Salethamide Maleate, Salicyl Alcohol, Salicylamide, Salicylate Meglumine, Salicylic Acid, Salmeterol, Salnacediin, Salsalate, sameridine, sampatrilat, Sancycline, sanfetrinem, Sanguinarium Chloride, Saperconazole, saprisartan, sapropterin, saquinavir, Sarafloxacin Hydrochloride, Saralasin Acetate, SarCNU, sarcophytol A, sargramostim, Sarmoxicillin, Sarpicillin, sarpogrelate, saruplase, saterinone, satigrel, satumomab pendetide, Schick Test Control, Scopafungin, Scopolamine Hydrobromide, Scrazaipine Hydrochloride, Sdi 1 mimetics, Secalciferol, Secobarbital, Seelzone, Seglitide Acetate, selegiline, Selegiline Hydrochloride, Selenium Sulfide, Selenomethionine Se 75, Selfotel, sematilide, semduramicin, semotiadil, semustine, sense oligonucleotides, Sepazonium Chloride, Seperidol Hydrochloride, Seprilose, Seproxetine Hydrochloride, Seractide Acetate, Sergolexole Maleate, Serine, Sermetacin, Sermorelin Acetate, sertaconazole, sertindole, sertraline, setiptiline, Setoperone, sevirumab, sevoflurane, sezolamide, Sibopirdine, Sibutramine Hydrochloride, signal transduction inhibitors, Silandrone, silipide, silteplase, Silver Nitrate, simendan, Simtrazene, Simvastatin, Sincalide, Sinefungin, sinitrodil, sinnabidol, sipatrigine, sirolimus, Sisomicin, Sitogluside, sizofuran, sobuzoxane, Sodium Amylosulfate, Sodium Iodide I 123, Sodium Nitroprusside, Sodium Oxybate, sodium phenylacetate, Sodium Salicylate, solverol, Solypertine Tartrate, Somalapor, Somantadine Hydrochloride, somatomedin B, somatomedin C, somatrem, somatropin, Somenopor, Somidobove, sonermin, Sorbinil, Sorivudine, sotalol, Soterenol Hydrochloride, Sparfloxacin, Sparfosate Sodium, sparfosic acid, Sparsomycin, Sparteine Sulfate, Spectinomycin Hydrochloride, spicamycin D, Spiperone, Spiradoline Mesylate, Spiramycin, Spirapril Hydrochloride, Spiraprilat, Spirogermanium Hydrochloride, Spiromustine, Spironolactone, Spiroplatin, Spiroxasone, splenopentin, spongistatin 1, Sprodiamide, squalamine, Stallimycin Hydrochloride, Stannous Pyrophosphate, Stannous Sulfur Colloid, Stanozolol, Statolon, staurosporine, stavudine, Steffimycin, Stenbolone Acetate, stepronin, Stilbazium Iodide, Stilonium Iodide, stipiamide, Stiripentol, stobadine, Streptomycin Sulfate, Streptonicozid, Streptonigrin, Streptozocin, stromelysin inhibitors, Strontium Chloride Sr 89, succibun, Succimer, Succinylcholine Chloride, Sucralfate, Sucrosofate Potassium, Sudoxicam, Sufentanil, Sufotidine, Sulazepam, Sulbactam Pivoxil, Sulconazole Nitrate, Sulfabenz, Sulfabenzamide, Sulfacetamide, Sulfacytine, Sulfadiazine, Sulfadoxine, Sulfalene, Sulfamerazine, Sulfameter, Sulfamethazine, Sulfamethizole, Sulfamethoxazole, Sulfamonomethoxine, Sulfamoxole, Sulfanilate Zinc, Sulfanitran, sulfasalazine, Sulfasomizole, Sulfazamet, Sulfinalol Hydrochloride, sulfinosine, Sulfinpyrazone, Sulfisoxazole, Sulfomyxin, Sulfonterol Hydrochloride, sulfoxamine, Sulinldac, Sulmarin, Sulnidazole, Suloctidil, Sulofenur, sulopenem, Suloxifen Oxalate, Sulpiride, Sulprostone, sultamicillin, Sulthiame, sultopride, sulukast, Sumarotene, sumatriptan, Suncillin Sodium, Suproclone, Suprofen, suradista, suramin, Surfomer, Suricamide Maleate, Suritozole, Suronacrine Maleate, Suxemerid Sulfate, swainsonine, symakalim, Symclosene, Symetine Hydrochloride, synthetic glycosaminoglycans, Taciamine Hydrochloride, Tacrine Hydrochloride, Tacrolimus, Talampicillin Hydrochloride, Taleranol, Talisomycin, tallimustine, Talmetacin, Talniflumate, Talopram Hydrochloride, Talosalate, Tametraline Hydrochloride, Tamoxifen, Tampramine Fumarate, Tamsulosin Hydrochloride, Tandamine Hydrochloride, tandospirone, tapgen, taprostene, Tasosartan, tauromustine, Taxane, Taxoid, Tazadolene Succinate, tazanolast, tazarotene, Tazifylline Hydrochloride, Tazobactam, Tazofelone, Tazolol Hydrochloride, Tebufelone, Tebuquine, Technetium Tc 99 m Bicisate, Teclozan, Tecogalan Sodium, Teecleukin, Teflurane, Tegafur, Tegretol, Teicoplanin, telenzepine, tellurapyrylium, telmesteine, telmisartan, telomerase inhibitors, Teloxantrone Hydrochloride, Teludipine Hydrochloride, Temafloxacin Hydrochloride, Tematropium Methyl sulfate, Temazepam, Temelastine, temocapril, Temocillin, temoporfin, temozolomide, Tenidap, Teniposide, tenosal, tenoxicam, tepirindole, Tepoxalin, Teprotide, terazosin, Terbinafine, Terbutaline Sulfate, Terconazole, terfenadine, terflavoxate, terguride, Teriparatide Acetate, terlakiren, terlipressin, terodiline, Teroxalene Hydrochloride, Teroxirone, tertatolol, Tesicam, Tesimide, Testolactone, Testosterone, Tetracaine, tetrachlorodecaoxide, Tetracycline, Tetrahydrozoline Hydrochloride, Tetramisole Hydrochloride, Tetrazolast Meglumine, tetrazomine, Tetrofosmin, Tetroquinone, Tetroxoprim, Tetrydamine, thaliblastine, Thalidomide, Theofibrate, Theophylline, Thiabendazole, Thiamiprine, Thiamphenicol, Thiamylal, Thiazesim Hydrochloride, Thiazinamium Chloride, Thiethylperazine, Thimerfonate Sodium, Thimerosal, thiocoraline, thiofedrine, Thioguanine, thiomarinol, Thiopental Sodium, thioperamide, Thioridazine, Thiotepa, Thiothixene, Thiphenamil Hydrochloride, Thiphencillin Potassium, Thiram, Thozalinone, Threonine, Thrombin, thrombopoietin, thrombopoietin mimetic, thymalfasin, thymopoietin receptor agonist, thymotrinan, Thyromedan Hydrochloride, Thyroxine I 125, Thyroxine I 131, Tiacrilast, Tiacrilast Sodium, tiagabine, Tiamenidine, tianeptine, tiapafant, Tiapamil Hydrochloride, Tiaramide Hydrochloride, Tiazofurin, Tibenelast Sodium, Tibolone, Tibric Acid, Ticabesone Propionate, Ticarbodine, Ticarcillin Cresyl Sodium, Ticlatone, ticlopidine, Ticrynafen, tienoxolol, Tifurac Sodium, Tigemonam Dicholine, Tigestol, Tiletamine Hydrochloride, Tilidine Hydrochloride, tilisolol, tilnoprofen arbamel, Tilorone Hydrochloride, Tiludronate Disodium, tiludronic acid, Timefurone, Timobesone Acetate, Timolol, tin ethyl etiopurpurin, Tinabinol, Timidazole, Tinzaparin Sodium, Tioconazole, Tiodazosin, Tiodonium Chloride, Tioperidone Hydrochloride, Tiopinac, Tiospirone Hydrochloride, Tiotidine, tiotropium bromide, Tioxidazole, Tipentosin Hydrochloride, Tipredane, Tiprenolol Hydrochloride, Tiprinast Meglumine, Tipropidil Hydrochloride, Tiqueside, Tiquinamide Hydrochloride, tirandalydigin, Tirapazamine, tirilazad, tirofiban, tiropramide, titanocene dichloride, Tixanox, Tixocortol Pivalate, Tizanidine Hydrochloride, Tobramycin, Tocamide, Tocamphyl, Tofenacin Hydrochloride, Tolamolol, Tolazamide, Tolazoline Hydrochloride, Tolbutamide, Tolcapone, Tolciclate, Tolfamide, Tolgabide, lamotrigine, Tolimidone, Tolindate, Tolmetin, Tolnaftate, Tolpovidone I 131, Tolpyrramide, Tolrestat, Tomelukast, Tomoxetine Hydrochloride, Tonazocine Mesylate, Topiramate, topotecan, Topotecan Hydrochloride, topsentin, Topterone, Toquizine, torasemide, toremifene, Torsemide, Tosifen, Tosufloxacin, totipotent stem cell factor, Tracazolate, trafermin, Tralonide, Tramadol Hydrochloride, Tramazoline Hydrochloride, trandolapril, Tranexamic Acid, Tranilast, Transcamide, translation inhibitors, traxanox, Trazodone Hydrochloride, Trazodone-HCL, Trebenzomine Hydrochloride, Trefentanil Hydrochloride, Treloxinate, Trepipam Maleate, Trestolone Acetate, tretinoin, Triacetin, triacetyluridine, Triafungin, Triamcinolone, Triampyzine Sulfate, Triamterene, Triazolam, Tribenoside, tricaprilin, Tricetamide, Trichlormethiazide, trichohyalin, triciribine, Tricitrates, Triclofenol piperazine, Triclofos Sodium, Triclonide, trientine, Trifenagrel, triflavin, Triflocin, Triflubazam, Triflumidate, Trifluoperazine Hydrochloride, Trifluperidol, Triflupromazine, Triflupromazine Hydrochloride, Trifluridine, Trihexyphenidyl Hydrochloride, Trilostane, Trimazosin Hydrochloride, trimegestone, Trimeprazine Tartrate, Trimethadione, Trimethaphan Camsylate, Trimethobenzamide Hydrochloride, Trimethoprim, Trimetozine, Trimetrexate, Trimipramine, Trimoprostil, Trimoxamine Hydrochloride, Triolein I 125, Triolein I 131, Trioxifene Mesylate, Tripamide, Tripelennamine Hydrochloride, Triprolidine Hydrochloride, Triptorelin, Trisulfapyrimidines, Troclosene Potassium, troglitazone, Trolamine, Troleandomycin, trombodipine, trometamol, Tropanserin Hydrochloride, Tropicamide, tropine ester, tropisetron, trospectomycin, trovafloxacin, trovirdine, Tryptophan, Tuberculin, Tubocurarine Chloride, Tubulozole Hydrochloride, tucarcsol, tulobuterol, turosteride, Tybamate, tylogenin, Tyropanoate Sodium, Tyrosine, Tyrothricin, tyrphostins, ubenimex, Uldazepam, Undecylenic Acid, Uracil Mustard, urapidil, Urea, Uredepa, uridine triphosphate, Urofollitropin, Urokinase, Ursodiol, valaciclovir, Valine, Valnoctamide, Valproate Sodium, Valproic Acid, valsartan, vamicamide, vanadeine, Vancomycin, vaminolol, Vapiprost Hydrochloride, Vapreotide, variolin B, Vasopressin, Vecuronium Bromide, velaresol, Velnacrine Maleate, venlafaxine, veradoline Hydrochloride, veramine, Verapamil Hydrochloride, verdins, Verilopam Hydrochloride, Verlukast, Verofylline, veroxan, verteporfin, Vesnarinone, vexibinol, Vidarabine, vigabatrin, Viloxazine Hydrochloride, Vinblastine Sulfate, vinburnine citrate, Vincofos, vinconate, Vincristine Sulfate, Vindesine, Vindesine Sulfate, Vinepidine Sulfate, Vinglycinate Sulfate, Vinleurosine Sulfate, vinorelbine, vinpocetine, vintoperol, vinxaltine, Vinzolidine Sulfate, Viprostol, Virginiamycin, Viridofulvin, Viroxime, vitaxin, Volazocine, voriconazole, vorozole, voxergolide, Warfarin Sodium, Xamoterol, Xanomeline, Xanoxate Sodium, Xanthinol Niacinate, xemilofiban, Xenalipin, Xenbucin, Xilobam, ximoprofen, Xipamide, Xorphanol Mesylate, Xylamidine Tosylate, Xylazine Hydrochloride, Xylometazoline Hydrochloride, Xylose, yangambin, zabicipril, zacopride, zafirlukast, Zalcitabine, zaleplon, zalospirone, Zaltidine Hydrochloride, zaltoprofen, zanamivir, zankiren, zanoterone, Zantac, Zarirlukast, zatebradine, zatosetron, Zatosetron Maleate, zenarestat, Zenazocine Mesylate, Zeniplatin, Zeranol, Zidometacin, Zidovudine, zifrosilone, Zilantel, zilascorb, zileuton, Zimeldine Hydrochloride, Zinc Undecylenate, Zindotrine, Zinoconazole Hydrochloride, Zinostatin, Zinterol Hydrochloride, Zinviroxime, ziprasidone, Zobolt, Zofenopril Calcium, Zofenoprilat, Zolamine Hydrochloride, Zolazepam Hydrochloride, zoledronie acid, Zolertine Hydrochloride, zolmitriptan, zolpidem, Zomepirac Sodium, Zometapine, Zoniclezole Hydrochloride, Zonisamide, zopiclone, Zopolrestat, Zorbamyciin, Zorubicin Hydrochloride, zotepine, Zucapsaicin, JTT-501 (PNU-182716) (Reglitazar), AR-H039122, MCC-555 (Netoglitazone), AR-H049020, Tesaglitazar), CS-011 (CI-1037), GW-409544X, KRP-297, RG-12525, BM-15.2054, CLX-0940, CLX-0921, DRF-2189, GW-1929, GW-9820, LR-90, LY-510929, NIP-221, NIP-223, JTP-20993, LY 29311 Na, FK 614, BMS 298585, R 483, TAK 559, DRF 2725 (Ragaglitazar), L-686398, L-168049, L-805645, L-054852, Demethyl asteriquinone B1 (L-783281), L-363586, KRP-297, P32/98, CRE-16336, EML-1625, pharmaceutically acceptable salts thereof, or a biologically active fragment, variant or derivative thereof, or a combination thereof. In some embodiments, a biologically active agent is selected from: leuprolide, octreotide, brimonidine, latanoprost, latanoprost acid, travoprost, travoprost acid, brinzolamide, dorzolamide, betaxolol, terbinafine, risperidone, and/or rapamycin, or a combination thereof.

[0337] Carbohydrate: The term “carbohydrate”, as used herein, refers to a biological molecule comprising carbon, oxygen and hydrogen; in some embodiments, a carbohydrate includes a saccharide, a sugar, a starch or cellulose. In some embodiments, saccharides include monosaccharides, disaccharides, oligosaccharides and polysaccharides. In some embodiments, a polysaccharide acts as a structural component or for energy storage. In some embodiments, a carbohydrate is involved in the immune system, fertilization, preventing pathogenesis, blood clotting and/or development. In some embodiments, a biologically active agent comprises a carbohydrate.

[0338] Cell penetrating peptide: The terms “cell penetrating peptide”, “cell penetrating protein”, “CPP” and the like, as used herein, refer to a peptide or protein having an ability to pass through cellular membranes. In various embodiments, a CPP is conjugated to a biologically active agent to facilitate transport of the agent across the membrane. In some embodiments, the CPP is useful in facilitating the uptake of such agents across cell membranes, such as the plasma membrane of a mammalian cell and/or the nuclear membrane of a mammalian cell. In some embodiments, a CPP is capable of being internalized into a cell and passing cellular membranes (including, inter alia, the outer “limiting” cell membrane (also commonly referred to as “plasma membrane”), endosomal membranes, and membranes of the endoplasmatic reticulum) and/or directing the passage of a given agent or cargo through these cellular membranes. In some embodiments, any possible mechanism of internalization is envisaged including both energy-dependent (i.e. active) transport mechanisms (e.g., endocytosis) and energy-independent (i.e. passive) transport mechanism (e.g., diffusion). In various embodiments, internalization includes involving the localization of at least a part of the peptides that passed through the plasma cellular membrane into the cytoplasma (in contrast to localization in different cellular compartments such as vesicles, endosomes or in the nucleus). A non-limiting example of a CPP is a peptide having amino acid sequence GRKKRRQRRRPPQ (SEQ ID NO: 2) (Vives; E. et al. (1997), supra). Non-limiting examples of CPPs include the HIV-1 TAT translocation domain (Green; M. and Loewenstein, P. M. (1988) Cell 55, 1179-1188) and the homeodomain of the Antennapedia protein from Drosophila (Joliot; A. et al. (1991) Proc. Natl. Acad. Sci. USA 88, 1864-1868); a sequence of 16 amino acids called penetratin or pAntp of the Antennapedia protein (Derossi, D. et al. (1994) J. Biol. Chem. 269, 10444-10450); a basic sequence of the HIV-1 Tat protein (Vives, E. et al. (1997) J. Biol. Chem. 272, 16010-16017); and a synthetic peptide developed is the amphipathic model peptide MAP (Oehlke, J. et al. (1998) Biochim. Biophys. Acta 1414, 127-139). Additional non-limiting examples of CPPs are described in U.S. Pat. Nos. 9,303,076; and 9,302,014.

[0339] Characteristic portion: As used herein, the phrase a “characteristic portion” of a protein or polypeptide is one that contains a continuous stretch of amino acids, or a collection of continuous stretches of amino acids, that together are characteristic of a protein or polypeptide. Each such continuous stretch generally will contain at least two amino acids. Furthermore, those of ordinary skill in the art will appreciate that typically at least 5, 10, 15, 20 or more amino acids are required to be characteristic of a protein. In general, a characteristic portion is one that, in addition to the sequence identity specified above, shares at least one functional characteristic with the relevant intact protein.

[0340] Characteristic sequence: A “characteristic sequence”, as used herein, is a sequence that is found in all members of a family of polypeptides or nucleic acids, and therefore can be used by those of ordinary skill in the art to define members of the family.

[0341] Characteristic structural element: The term “characteristic structural element”, as used herein, refers to a distinctive structural element (e.g., core structure, collection of pendant moieties, sequence element, etc) that is found in all members of a family of polypeptides, small molecules, or nucleic acids, and therefore can be used by those of ordinary skill in the art to define members of the family.

[0342] Chemotherapeutic agent: The term “chemotherapeutic agent”, as used herein, refers to a drug or agent capable of killing growing cells, including cancer cells. Chemotherapeutic agents are frequently used to treat various forms of cancer. In some embodiments, non-limiting examples of chemotherapeutic agents include adriamycin, paclitaxel (Taxol), docetaxel (Taxotere), actinomycin D, doxorubicin, daunorubicin, valrubicin, idarubicin, epirubicin, bleomycin, plicamycin, camptothecin and derivatives, bleomycin, etoposide, teniposide, mitomycin, vinca alkaloids, such as vinblastine and vincristine, and platinum-based compounds such as cisplatin, gemcitabine. In some embodiments, a composition comprises a lipid and a portion of a chemotherapeutic agent capable of mediating at least one function of a chemotherapeutic agent.

[0343] Comparable: The term “comparable”, as used herein, is used herein to describe two (or more) sets of conditions or circumstances that are sufficiently similar to one another to permit comparison of results obtained or phenomena observed. In some embodiments, comparable sets of conditions or circumstances are characterized by a plurality of substantially identical features and one or a small number of varied features. Those of ordinary skill in the art will appreciate that sets of conditions are comparable to one another when characterized by a sufficient number and type of substantially identical features to warrant a reasonable conclusion that differences in results obtained or phenomena observed under the different sets of conditions or circumstances are caused by or indicative of the variation in those features that are varied.

[0344] Conjugate: The term “conjugate”, as used herein, refers to a composition comprising two or more components, moieties or molecules which are physically linked together, e.g., by a covalent bond, either directly or indirectly (as a non-limiting example, with one or more linkers interposed between two adjacent components, moieties or molecules). The term “conjugated”, as used herein, in reference to a composition comprising two or more components, moieties or molecules, references the state the two or more components, moieties or molecules are physically linked together. In some embodiments, a composition comprises a lipid and a biologically active agent, wherein the lipid and the biologically active agent are conjugated.

[0345] CRISPR and related terms: The term “CRISPR”, “CRISPR/Cas system” and the like, as used herein, refers to a biologically active system involving clustered regularly-interspaced short palindromic repeats (CRISPR), which are segments of prokaryotic DNA containing short repetitions of base sequences, or various artificial systems derived or inspired by the naturally-occurring prokaryotic system. In some embodiments, a biologically active agent comprises a component of a CRISPR/Cas system. In some embodiments, a component of a CRISPR/Cas system include, without limitation: a gene encoding a Cas protein (including, as non-limiting examples, Cas9, dCas9, and variants thereof, both naturally-occurring and artificial) or the protein itself; a guide RNA; any component of a CAS crRNA complex; a cas (CRISPR-associated) gene or gene product; and any other biologically active molecule involved in a naturally-occurring or artificial CRISPR/Cas system. See, for example, Jinek et al. 2012 Science 337: 816-821; Cong et al. 2013 Science 339: 819-823; U.S. Pat. App. 20140234972; DiCarlo 2013 Nucl. Acids Res. 41: 4336-43; Hwang et al. 2013 Nat. Biotech. 31: 227-9; and Flowers et al. 2014 Development 141: 2165-71.

[0346] Cycloaliphatic: The term “cycloaliphatic,” as used herein, refers to saturated or partially unsaturated aliphatic monocyclic, bicyclic, or polycyclic ring systems having, e.g., from 3 to 30, members, wherein the aliphatic ring system is optionally substituted. Cycloaliphatic groups include, without limitation, cyclopropyl, cyclobutyl, cyclopentyl, cyclopentenyl, cyclohexyl, cyclohexenyl, cycloheptyl, cycloheptenyl, cyclooctyl, cyclooctenyl, norbornyl, adamantyl, and cyclooctadienyl. In some embodiments, the cycloalkyl has 3-6 carbons. The terms “cycloaliphatic” may also include aliphatic rings that are fused to one or more aromatic or nonaromatic rings, such as decahydronaphthyl or tetrahydronaphthyl, where the radical or point of attachment is on the aliphatic ring. In some embodiments, a carbocyclic group is bicyclic. In some embodiments, a carbocyclic group is tricyclic. In some embodiments, a carbocyclic group is polycyclic. In some embodiments, “cycloaliphatic” (or “carbocycle” or “cycloalkyl”) refers to a monocyclic C₃-C₆ hydrocarbon, or a C₈-C₁₀ bicyclic hydrocarbon that is completely saturated or that contains one or more units of unsaturation, but which is not aromatic, that has a single point of attachment to the rest of the molecule, or a C₉-C₁₆ tricyclic hydrocarbon that is completely saturated or that contains one or more units of unsaturation, but which is not aromatic, that has a single point of attachment to the rest of the molecule.

[0347] Dosing regimen: As used herein, a “dosing regimen” or “therapeutic regimen” refers to a set of unit doses (typically more than one) that are administered individually to a subject, typically separated by periods of time. In some embodiments, a given therapeutic agent has a recommended dosing regimen, which may involve one or more doses. In some embodiments, a dosing regimen comprises a plurality of doses each of which are separated from one another by a time period of the same length; in some embodiments, a dosing regime comprises a plurality of doses and at least two different time periods separating individual doses. In some embodiments, all doses within a dosing regimen are of the same unit dose amount. In some embodiments, different doses within a dosing regimen are of different amounts. In some embodiments, a dosing regimen comprises a first dose in a first dose amount, followed by one or more additional doses in a second dose amount different from the first dose amount. In some embodiments, a dosing regimen comprises a first dose in a first dose amount, followed by one or more additional doses in a second dose amount same as the first dose amount.

[0348] Equivalent agents: Those of ordinary skill in the art, reading the present disclosure, will appreciate that the scope of useful agents in the context of the present invention is not limited to those specifically mentioned or exemplified herein. In particular, those skilled in the art will recognize that active agents typically have a structure that consists of a core and attached pendant moieties, and furthermore will appreciate that simple variations of such core and/or pendant moieties may not significantly alter activity of the agent. For example, in some embodiments, substitution of one or more pendant moieties with groups of comparable three-dimensional structure and/or chemical reactivity characteristics may generate a substituted compound or portion equivalent to a parent reference compound or portion. In some embodiments, addition or removal of one or more pendant moieties may generate a substituted compound equivalent to a parent reference compound. In some embodiments, alteration of core structure, for example by addition or removal of a small number of bonds (typically not more than 5, 4, 3, 2, or 1 bonds, and often only a single bond) may generate a substituted compound equivalent to a parent reference compound. In many embodiments, equivalent compounds may be prepared by methods illustrated in general reaction schemes as, for example, described below, or by modifications thereof, using readily available starting materials, reagents and conventional or provided synthesis procedures. In these reactions, it is also possible to make use of variants, which are in themselves known, but are not mentioned here.

[0349] Equivalent Dosage: The term “equivalent dosage”, as used herein, is used herein to compare dosages of different pharmaceutically active agents that effect the same biological result. Dosages of two different agents are considered to be “equivalent” to one another in accordance with the present invention if they achieve a comparable level or extent of the biological result. In some embodiments, equivalent dosages of different pharmaceutical agents for use in accordance with the present invention are determined using in vitro and/or in vivo assays as described herein. In some embodiments, one or more lysosomal activating agents for use in accordance with the present invention is utilized at a dose equivalent to a dose of a reference lysosomal activating agent; in some such embodiments, the reference lysosomal activating agent for such purpose is selected from the group consisting of small molecule allosteric activators (e.g., pyrazolpyrimidines), imminosugars (e.g., isofagomine), antioxidants (e.g., n-acetyl-cysteine), and regulators of cellular trafficking (e.g., Rab1a polypeptide).

[0350] Halogen: The term “halogen”, as used herein, means F, Cl, Br, or I.

[0351] Heteroaliphatic: The term “heteroaliphatic”, as used herein, is given its ordinary meaning in the art and refers to aliphatic groups as described herein in which one or more carbon atoms are independently replaced with one or more heteroatoms (e.g., oxygen, nitrogen, sulfur, silicon, phosphorus, and the like). In some embodiments, one or more units selected from C, CH, CH₂, or CH₃ are independently replaced by one or more heteroatoms (including oxidized and/or substituted form thereof). In some embodiments, a heteroaliphatic group is heteroalkyl. In some embodiments, a heteroaliphatic group is heteroalkenyl.

[0352] Heteroalkyl: The term “heteroalkyl”, as used herein, is given its ordinary meaning in the art and refers to alkyl groups as described herein in which one or more carbon atoms are independently replaced with one or more heteroatoms (e.g., oxygen, nitrogen, sulfur, silicon, phosphorus, and the like). Examples of heteroalkyl groups include, but are not limited to, alkoxy, poly(ethylene glycol)-, alkyl-substituted amino, tetrahydrofuranyl, piperidinyl, morpholinyl, etc.

[0353] Heteroaryl: The terms “heteroaryl” and “heteroar-”, as used herein, used alone or as part of a larger moiety, e.g., “heteroaralkyl,” or “heteroaralkoxy,” refer to monocyclic, bicyclic or polycyclic ring systems having a total of five to thirty ring members, wherein at least one ring in the system is aromatic and at least one aromatic ring atom is a heteroatom. In some embodiments, a heteroaryl group is a group having 5 to 10 ring atoms (i.e., monocyclic, bicyclic or polycyclic), in some embodiments 5, 6, 9, or 10 ring atoms. In some embodiments, a heteroaryl group has 6, 10, or 14 it electrons shared in a cyclic array; and having, in addition to carbon atoms, from one to five heteroatoms. Heteroaryl groups include, without limitation, thienyl, furanyl, pyrrolyl, imidazolyl, pyrazolyl, triazolyl, tetrazolyl, oxazolyl, isoxazolyl, oxadiazolyl, thiazolyl, isothiazolyl, thiadiazolyl, pyridyl, pyridazinyl, pyrimidinyl, pyrazinyl, indolizinyl, purinyl, naphthyridinyl, and pteridinyl. In some embodiments, a heteroaryl is a heterobiaryl group, such as bipyridyl and the like. The terms “heteroaryl” and “heteroar-”, as used herein, also include groups in which a heteroaromatic ring is fused to one or more aryl, cycloaliphatic, or heterocyclyl rings, where the radical or point of attachment is on the heteroaromatic ring. Non-limiting examples include indolyl, isoindolyl, benzothienyl, benzofuranyl, dibenzofuranyl, indazolyl, benzimidazolyl, benzthiazolyl, quinolyl, isoquinolyl, cinnolinyl, phthalazinyl, quinazolinyl, quinoxalinyl, 4H-quinolizinyl, carbazolyl, acridinyl, phenazinyl, phenothiazinyl, phenoxazinyl, tetrahydroquinolinyl, tetrahydroisoquinolinyl, and pyrido[2,3-b]-1,4-oxazin-3(4H)-one. A heteroaryl group may be monocyclic, bicyclic or polycyclic. The term “heteroaryl” may be used interchangeably with the terms “heteroaryl ring,” “heteroaryl group,” or “heteroaromatic,” any of which terms include rings that are optionally substituted. The term “heteroaralkyl” refers to an alkyl group substituted by a heteroaryl group, wherein the alkyl and heteroaryl portions independently are optionally substituted.

[0354] Heteroatom: The term “heteroatom”, as used herein, means an atom that is not carbon or hydrogen. In some embodiments, a heteroatom is oxygen, sulfur, nitrogen, phosphorus, or silicon (including any oxidized form of nitrogen, sulfur, phosphorus, or silicon; the quaternized form of any basic nitrogen or a substitutable nitrogen of a heterocyclic ring (for example, N as in 3,4-dihydro-2H-pyrrolyl), NH (as in pyrrolidinyl) or NR⁺ (as in N-substituted pyrrolidinyl); etc.).

[0355] Heterocyclyl: As used herein, the terms “heterocycle,” “heterocyclyl,” “heterocyclic radical,” and “heterocyclic ring”, as used herein, are used interchangeably and refer to a monocyclic, bicyclic or polycyclic ring moiety (e.g., 3-30 membered) that is saturated or partially unsaturated and has one or more heteroatom ring atoms. In some embodiments, a heterocyclyl group is a stable 5- to 7-membered monocyclic or 7- to 10-membered bicyclic heterocyclic moiety that is either saturated or partially unsaturated, and having, in addition to carbon atoms, one or more, preferably one to four, heteroatoms, as defined above. When used in reference to a ring atom of a heterocycle, the term “nitrogen” includes substituted nitrogen. As an example, in a saturated or partially unsaturated ring having 0-3 heteroatoms selected from oxygen, sulfur or nitrogen, the nitrogen may be N (as in 3,4-dihydro-2H-pyrrolyl), NH (as in pyrrolidinyl), or +NR (as in N-substituted pyrrolidinyl). A heterocyclic ring can be attached to its pendant group at any heteroatom or carbon atom that results in a stable structure and any of the ring atoms can be optionally substituted. Examples of such saturated or partially unsaturated heterocyclic radicals include, without limitation, tetrahydrofuranyl, tetrahydrothienyl, pyrrolidinyl, piperidinyl, pyrrolinyl, tetrahydroquinolinyl, tetrahydroisoquinolinyl, decahydroquinolinyl, oxazolidinyl, piperazinyl, dioxanyl, dioxolanyl, diazepinyl, oxazepinyl, thiazepinyl, morpholinyl, and quinuclidinyl. The terms “heterocycle,” “heterocyclyl,” “heterocyclyl ring,” “heterocyclic group,” “heterocyclic moiety,” and “heterocyclic radical,” are used interchangeably herein, and also include groups in which a heterocyclyl ring is fused to one or more aryl, heteroaryl, or cycloaliphatic rings, such as indolinyl, 3H-indolyl, chromanyl, phenanthridinyl, or tetrahydroquinolinyl. A heterocyclyl group may be monocyclic, bicyclic or polycyclic. The term “heterocyclylalkyl” refers to an alkyl group substituted by a heterocyclyl, wherein the alkyl and heterocyclyl portions independently are optionally substituted.

[0356] Immunomodulatory nucleic acid and CpG oligonucleotide and related terms: The term “immunomodulatory nucleic acid”, as used herein, refers to a nucleic acid which is capable of modulating an immune response, e.g., in a mammal, e.g., in a human subject. In various embodiments, the immunomodulatory nucleic acid is capable of stimulating (agonizing) an immune response; in other embodiments, different immunomodulatory nucleic acids are capable of decreasing (antagonizing) an immune response. In non-limiting examples, an immunomodulatory nucleic acid includes a CpG oligonucleotide. The term “CpG olignonucleotide”, as used herein, refers to an oligonucleotide comprising an unmethylated CpG motif, wherein the oligonucleotide can comprise nucleotides, modified nucleotides and/or nucleotide analogs. In some embodiments, a CpG oligonucleotide is capable of agonizing a TLR9-mediated and/or TLR9-associated immune response in at least one assay; in some embodiments, a CpG oligonucleotide is capable of antagonizing an immune response in at least one assay. Others do neither. In some embodiments, a CpG oligonucleotide can optionally comprise modifications of the sugar, base or phosphate (phosphodiester), as well as secondary and tertiary structures. See, for example, Vollmer et al. 2009 Adv. Drug. Del. Rev. 61: 195-204. In some embodiments, an example of a modified phosphodiester is a phosphorothioate. In some embodiments, one or more phosphorothioates (PS) is incorporated into the backbone of a CpG oligonucleotide (in place of a phosphodiester or PO); the PS can reportedly reduce nuclease degradation and, in at least some cases, enhance the immunogenic activity of the CpG oligonucleotide 10- to 100-fold. Vollmer et al. 2009 Adv. Drug Del. Rev. 61: 195-204. In some embodiments, a CpG oligonucleotide can comprise all phosphodiesters in the backbone; or a mixture of phosphodiesters and internucleoside linkers in the backbone; or all internucleoside linkers in the backbone. For example, WO 2015/108047 reports CpG oligonucleotides with a mixture of phosphodiester and internucleoside (e.g., phosphorothioate) linkages; in this case, the CpG region motif comprises phosphodiesters, with phosphorothioates flanking the CpG region motif. In various embodiments, the CpG oligonucleotide can comprise a phosphorothioate which is in the Rp or Sp conformation. The terms “CpG ODN” or “CpG oligodeoxynucleotide” as used in the literature, and as used herein, are not strictly limited to oligonucleotides wherein “p” is a phosphate; these terms have previously been used in the literature and are used herein to encompass oligonucleotides which comprise one or more phosphorothioates in place of phosphodiesters, or even comprise all phosphorothioates in their backbones, and/or other modifications. In some embodiments, an “immunostimulatory” CpG oligonucleotide is capable of agonizing an immune response. In some embodiments, a CpG oligonucleotide can comprise one strand; or, optionally, it can further comprise a second or other additional strands. In some embodiments, a CpG oligonucleotide can further comprise or be conjugated to other components which are not nucleotides. In some embodiments, a composition comprises a lipid and a portion of an immunomodulatory nucleic acid capable of mediating at least one function of an immunomodulatory nucleic acid.

[0357] Intraperitoneal: The phrases “intraperitoneal administration” and “administered intraperitonealy” as used herein have their art-understood meaning referring to administration of a compound or composition into the peritoneum of a subject.

[0358] In vitro: As used herein, the term “in vitro” refers to events that occur in an artificial environment, e.g., in a test tube or reaction vessel, in cell culture, etc., rather than within an organism (e.g., animal, plant, and/or microbe).

[0359] In vivo: As used herein, the term “in vivo” refers to events that occur within an organism (e.g., animal, plant, and/or microbe).

[0360] Linker: The term “linker”, as used herein, refers to a moiety that connects two parts of a composition; as a non-limiting example, a linker physically connects a biologically active agent to a lipid. Non-limiting examples of suitable linkers include: an uncharged linker; a charged linker; a linker comprising an alkyl; a linker comprising a phosphate; a branched linker; an unbranched linker; a linker comprising at least one cleavage group; a linker comprising at least one redox cleavage group; a linker comprising at least one phosphate-based cleavage group; a linker comprising at least one acid-cleavage group; a linker comprising at least one ester-based cleavage group; a linker comprising at least one peptide-based cleavage group. Other non-limiting examples of linkers are described herein, or detailed in FIG. 7.

[0361] Lower alkyl: The term “lower alkyl”, as used herein, refers to a C₁₋₄ straight or branched alkyl group. Example lower alkyl groups are methyl, ethyl, propyl, isopropyl, butyl, isobutyl, and tert-butyl.

[0362] Lipid: The term “lipid”, as used herein, refers to any member of a large group of molecules which are generally at least partially hydrophobic or amphiphilic, and include, inter alia, phospholipids, triglycerides, diglycerides, monoglycerides, fat-soluble vitamins, sterols, fats and waxes. In some embodiments, lipids include fatty acids, glycerolipids, glycerophospholipids, sphingolipids, sterol lipids, prenol lipids, saccharolipids, polyketides, and other molecules. In some embodiments, the present disclosure pertains to a composition comprising a biologically active agent and a lipid comprising a C₁₀-C₈₀ linear, saturated or partially unsaturated, aliphatic chain. In some embodiments, the present disclosure pertains to a composition comprising a biologically active agent and a lipid comprising a C₁₀-C₈₀ linear, saturated or partially unsaturated, aliphatic chain, optionally substituted with one or more C₁₋₄ aliphatic group. In some embodiments, the present disclosure pertains to a composition comprising a biologically active agent and a lipid comprising a C₁₀-C₆₀ linear, saturated or partially unsaturated, aliphatic chain. In some embodiments, the present disclosure pertains to a composition comprising a biologically active agent and a lipid comprising a C₁₀-C₆₀ linear, saturated or partially unsaturated, aliphatic chain, optionally substituted with one or more C-4 aliphatic group. In some embodiments, the present disclosure pertains to a composition comprising a biologically active agent and a lipid comprising a C₁₀-C₄₀ linear, saturated or partially unsaturated, aliphatic chain. In some embodiments, the present disclosure pertains to a composition comprising a biologically active agent and a lipid comprising a C₁₀-C₄₀ linear, saturated or partially unsaturated, aliphatic chain, optionally substituted with one or more C₁₋₄ aliphatic group. In some embodiments, a lipid includes, without limitation, lauric acid, myristic acid, palmitic acid, stearic acid, oleic acid, linoleic acid, alpha-linolenic acid, gamma-linolenic acid, docosahexaenoic acid (cis-DHA), turbinaric acid and dilinoleyl. In some embodiments, a lipid includes, without limitation: an amino lipid; an amphipathic lipid; an anionic lipid; an apolipoprotein; a cationic lipid; a low molecular weight cationic lipid; a cationic lipid such as CLinDMA and DLinDMA; an ionizable cationic lipid; a cloaking component; a helper lipid; a lipopeptide; a neutral lipid; a neutral zwitterionic lipid; a hydrophobic small molecule; a hydrophobic vitamin; a PEG-lipid; an uncharged lipid modified with one or more hydrophilic polymers; phospholipid; a phospholipid such as 1,2-dioleoyl-sn-glycero-3-phosphoethanolamine; a stealth lipid; a sterol; a cholesterol; and a targeting lipid; and any other lipid described herein or reported in the art. In some embodiments, a composition comprises a lipid and a portion of another lipid capable of mediating at least one function of another lipid. In various embodiments, a composition of the present disclosure comprises any one or more of any lipid described herein or known in the art.

[0363] lncRNA: The terms “Long non-coding RNA” and “lncRNA”, as used herein, refer to non-protein coding RNA transcripts longer than about 200 nucleotides. This numerical limit distinguishes long ncRNAs from small regulatory RNAs such as microRNAs (miRNAs), short interfering RNAs (siRNAs), Piwi-interacting RNAs (piRNAs), small nucleolar RNAs (snoRNAs), and other short RNAs. In some embodiments, a lncRNA bears one or more signatures of mRNAs, including 5′ capping, splicing, and poly-adenylation, but has little or no open reading frame (ORF). In some embodiments, a IncRNA is Air or Xist. In some embodiments, a IncRNA functions in regulating expression of another gene. In some embodiments, a IncRNA is a IncRNA listed in any lncRNA database, including, but not limited to: ChIPBase, C-It-Loci, LNCipedia, lncRNABase, lncRNAdb, lncRNome, MONOCLdb, NONCODE, and NRED. In some embodiments, a composition comprises a lipid and a portion of a lncRNA capable of mediating at least one function of a lncRNA.

[0364] mRNA: The terms “Messenger RNA”, “mRNA” and the like, as used herein, refer to any of a large family of RNA molecules that convey genetic information from DNA to the ribosome, where they specify the amino acid sequence of the protein products of gene expression. In various embodiments, following transcription of primary transcript mRNA (known as pre-mRNA) by RNA polymerase, processed, mature mRNA is translated into a polymer of amino acids: a protein, as summarized in the central dogma of molecular biology. In some embodiments, the mRNA includes a modified mRNA or mmRNA. U.S. Pat. No. 9,220,792. In some embodiments, a mRNA encodes any of: an allergen, a blood component, a gene therapy product, a human tissue or cellular product used in transplantation, a vaccine, an antibody, a cytokine, a growth factor, an enzyme, a thrombolytic, or an immunomodulator. In some embodiments, a composition comprises a lipid and a portion of a mRNA capable of mediating at least one function of a mRNA.

[0365] Muscle: The term “muscle”, as used herein, refers to a type of tissue found in animals (including, without limitation, mammals, including humans); muscle tissue is a type of fibrous tissue that has the ability to contract, producing movement in or maintaining the position of parts of the body. A muscle cell or tissue includes any skeletal muscle cell or tissue, cardiac muscle cell or tissue, smooth muscle cell or tissue, and/or myoepithelial cell or tissue. In some embodiments, a muscle cell or tissue includes a heart muscle cell or tissue. In some embodiments, a muscle cell or tissue includes a thoracic diaphragm muscle cell or tissue. In some embodiments, a muscle cell or tissue is a skeletal muscle cell or tissue. In various embodiments, a muscle cell or tissue is selected from: abductor digiti minimi (foot), abductor digiti minimi (hand), abductor hallucis, abductor pollicis brevis, abductor pollicis longus, adductor brevis, adductor hallucis, adductor longus, adductor magnus, adductor pollicis, anconeus, articularis cubiti, articularis genu, aryepiglotticus, aryjordanicus, auricularis, biceps brachii, biceps femoris, brachialis, brachioradialis, buccinator, bulbospongiosus, constrictor of pharynx—inferior, constrictor of pharynx—middle, constrictor of pharynx—superior, coracobrachialis, corrugator supercilii, cremaster, cricothyroid, dartos, deep transverse perinei, deltoid, depressor anguli oris, depressor labii inferioris, thoracic diaphragm, digastric, digastric (anterior view), erector spinae—spinalis, erector spinae—iliocostalis, erector spinae—longissimus, extensor carpi radialis brevis, extensor carpi radialis longus, extensor carpi ulnaris, extensor digiti minimi (hand), extensor digitorum (hand), extensor digitorum brevis (foot), extensor digitorum longus (foot), extensor hallucis longus, extensor indicis, extensor pollicis brevis, extensor pollicis longus, external oblique abdominis, flexor carpi radialis, flexor carpi ulnaris, flexor digiti minimi brevis (foot), flexor digiti minimi brevis (hand), flexor digitorum brevis, flexor digitorum longus (foot), flexor digitorum profundus, flexor digitorum superficialis, flexor hallucis brevis, flexor hallucis longus, flexor pollicis brevis, flexor pollicis longus, frontalis, gastrocnemius, gemellus inferior, gemellus superior, genioglossus, geniohyoid, gluteus maximus, gluteus medius, gluteus minimus, gracilis, hyoglossus, iliacus, inferior oblique, inferior rectus, infraspinatus, intercostals external, intercostals innermost, intercostals internal, internal oblique abdominis, interossei—dorsal of hand, interossei—dorsal of foot, interossei-palmar of hand, interossei—plantar of foot, interspinales, intertransversarii, intrinsic muscles of tongue, ishiocavernosus, lateral cricoarytenoid, lateral pterygoid, lateral rectus, latissimus dorsi, levator anguli oris, levator ani—coccygeus, levator ani—iliococcygeus, levator ani-pubococcygeus, levator ani—puborectalis, levator ani—pubovaginalis, levator labii superioris, levator labii superioris, alaeque nasi, levator palpebrae superioris, levator scapulae, levator veli palatini, levatores costarum, longus capitis, longus colli, lumbricals of foot (4), lumbricals of hand, masseter, medial pterygoid, medial rectus, mentalis, m. uvulae, mylohyoid, nasalis, oblique arytenoid, obliquus capitis inferior, obliquus capitis superior, obturator externus, obturator internus (A), obturator internus (B), omohyoid, opponens digiti minimi (hand), opponens pollicis, orbicularis oculi, orbicularis oris, palatoglossus, palatopharyngeus, palmaris brevis, palmaris longus, pectineus, pectoralis major, pectoralis minor, peroneus brevis, peroneus longus, peroneus tertius, piriformis (A), piriformis (B), plantaris, platysma, popliteus, posterior cricoarytenoid, procerus, pronator quadratus, pronator teres, psoas major, psoas minor, pyramidalis, quadratus femoris, quadratus lumborum, quadratus plantae, rectus abdominis, rectus capitus anterior, rectus capitus lateralis, rectus capitus posterior major, rectus capitus posterior minor, rectus femoris, rhomboid major, rhomboid minor, risorius, salpingopharyngeus, sartorius, scalenus anterior, scalenus medius, scalenus minimus, scalenus posterior, semimembranosus, semitendinosus, serratus anterior, serratus posterior inferior, serratus posterior superior, soleus, sphincter ani, sphincter urethrae, splenius capitis, splenius cervicis, stapedius, sternocleidomastoid, sternohyoid, sternothyroid, styloglossus, stylohyoid, stylohyoid (anterior view), stylopharyngeus, subclavius, subcostalis, subscapularis, superficial transverse, perinei, superior oblique, superior rectus, supinator, supraspinatus, temporalis, temporoparietalis, tensor fasciae lata, tensor tympani, tensor veli palatini, teres major, teres minor, thyro—arytenoid & vocalis, thyro—epiglotticus, thyrohyoid, tibialis anterior, tibialis posterior, transverse arytenoid, transversospinalis—multifidus, transversospinalis—rotatores, transversospinalis—semispinalis, transversus abdominis, transversus thoracis, trapezius, triceps, vastus intermedius, vastus lateralis, vastus medialis, zygomaticus major, and zygomaticus minor. In some embodiments, the muscle cell or tissue is a smooth muscle cell or tissue. In various embodiments, the muscle cell or tissue is selected from a muscle cell or tissue found in any of: esophagus, stomach, intestines, bronchi, uterus, urethra, bladder, blood vessels, and the arrector pili in the skin. In various embodiments, a muscle cell or tissues includes any structure or sub-structure which is a part of a muscle, including, but not limited to: epimysium, myocyte, sarcomere, tendon, fascile, muscle fiber, perimysium, collagen, collagen fiber, muscle spindle, sarcolemma, sarcoplasmic reticulum, thin filament, thick filament, Z disc, H zone, I band, A band or M line. In some embodiments, the muscle cell or tissue is healthy. In some embodiments, the muscle cell or tissue is afflicted with a disorder or disease.

[0366] Muscle-related disorder and the like: The terms “muscle-related disorder”, “muscle-related disease” and the like, as used herein, refers to a disease or disorder associated with a muscle cell or tissue, or neuromuscular system, including a skeletal muscle cell or tissue, cardiac muscle cell or tissue, smooth muscle cell or tissue, or myoepithelial cell or tissue, or other muscle cell or tissue. In various embodiments, the present disclosure pertains to a method pertaining to a composition comprising a lipid and a biologically active agent, wherein the composition is administered to a subject who is suffering from a muscle-related disorder. In various embodiments, a muscle-related disorder is sarcopenia, a muscle movement disorder, a muscle wasting-related disorder, muscle degeneration, muscle weakness, muscular dystrophy, Duchenne muscular dystrophy, heart failure, breathing disorder, skeletal muscle degeneration caused by malnutrition and disease, a muscle-related disease related to impaired insulin-dependent signaling, amyotrophic lateral sclerosis, spinal muscle atrophy and spinal cord injury, ischemic muscle disease. In some embodiments, a muscle related disorder includes, for example, shoulder stiffness, frozen shoulder (stiff shoulder due to age), rheumatoid arthritis, myofascitis, neck muscle rigidity, neck-shoulder-arm syndrome, whiplash syndrome, sprain, tendon sheath inflammation, low back pain syndrome, skeletal muscle atrophy and the like. In some embodiments, a muscle movement disorder includes a condition associated with one or more of bruxism, periodic limb movement disorder, restless leg syndrome, muscular dystrophy, muscle inflammation, pinched nerves, peripheral nerve damage, amyotrophic lateral sclerosis, myasthenia gravis, and disc herniation, sleep-related involuntary muscle movement disorder. In some embodiments, a muscle wasting-related disorder is a disease or condition that involves symptoms such as the gradual loss of muscle mass. In some embodiments, a muscle wasting is attributed to any of various causes, including genetic predispositions; age-related diseases such as hypertension, impaired glucose tolerance, diabetes, obesity, dyslipidemia, atherosclerosis, and cardiovascular diseases; chronic diseases such as cancers, autoimmune diseases, infectious diseases, AIDS, chronic inflammatory diseases, arthritis, malnutrition, renal diseases, chronic obstructive pulmonary disease, pulmonary emphysema, rachitis, chronic lower spine pain, peripheral nerve injury, central nerve injury, and chemical injury; conditions such as long-term immobilization, ineffectualness-like conditions such as bone fracture or trauma, and post-surgery bed rest; and the progressive decrease in skeletal muscle mass and strength caused by aging processes. The muscle wasting-related disease can cause weakened physical conditions, which can deteriorate health conditions and induce incapable physical activity. In some embodiments, sarcopenia is the gradual decrease in skeletal muscle mass caused by aging, which can directly cause a decrease in muscle strength, resulting in a decrease and impairment in various physical functions. In some embodiments, a muscular dystrophy is a disorder in which strength and muscle bulk gradually decline. Non-limiting examples of muscular dystrophy diseases includes Becker muscular dystrophy, tibial muscular dystrophy, Duchenne muscular dystrophy, Emery-Dreifuss muscular dystrophy, facioscapulohumeral muscular dystrophy, sarcoglycanopathies, congenital muscular dystrophy such as congenital muscular dystrophy due to partial LAMA2 deficiency, merosin-deficient congenital muscular dystrophy, type 1D congenital muscular dystrophy, Fukuyama congenital muscular dystrophy, limb-girdle type 1A muscular dystrophy, limb-girdle type 2A muscular dystrophy, limb-girdle type 2B muscular dystrophy, limb-girdle type 2C muscular dystrophy, limb-girdle type 2D muscular dystrophy, limb-girdle type 2E muscular dystrophy, limb-girdle type 2F muscular dystrophy, limb-girdle type 2G muscular dystrophy, limb-girdle type 2H muscular dystrophy, limb-girdle type 21 muscular dystrophy, limb-girdle type 21 muscular dystrophy, limb-girdle type 2J muscular dystrophy, limb-girdle type 2K muscular dystrophy, limb-girdle type IC muscular dystrophy, rigid spine muscular dystrophy with epidermolysis bullosa simplex, oculopharyngeal muscular dystrophy, Ullrich congenital muscular dystrophy, and Ullrich scleroatonic muscular dystrophy. In some embodiments, a subject has Duchenne muscular dystrophy. In some embodiments, a muscle degeneration is caused by an injury, by a degenerative muscle disease or disorder, or by a disease, disorder or damage to the nervous system which results in denervation of muscle. Such diseases or disorders include, but are not limited to, degenerative or inflammatory muscle diseases such as muscular dystrophy, myotonic dystrophy, fascio-scapulo-humoral dystrophy, limb girdle dystrophy, distal muscular dystrophy or myositis or peripheral neuropathies associated with diabetic neuropathy, acute neurapraxia, neurotmesis or axotmesis. In addition, the methods described herein can be used to diagnose or monitor neurological degenerative diseases, especially those associated with degeneration of motor neurons, such as amylotrophic laterial sclerosis, spinal muscular atrophy, post-polio syndrome, infantile muscular atrophy, poliomyelitis or Charlot-Marie Tooth disease or inflammatory or demyelinating neurological diseases or disorders such as Guillan-Barre Syndrome or chronic inflammatory demyelinating polyneuropathy. The methods of the present invention may also be used to diagnose or monitor degeneration caused by nerve injuries such as those associated with carpal tunnel syndrome, compression, mechanical severance of a nerve or a tumor. In addition, the methods disclosed herein may be utilized to diagnose neural or non-neuronal tumors.

[0367] ncRNA: The term “ncRNA”, as used herein, refers to non-coding RNA, of which there are several types, including, but not limited to lncRNA (long non-coding RNA). In some embodiments, a ncRNA participates in regulating the expression of a gene or protein or gene product. Wahlestedt 2013 Nat. Rev. Drug Disc. 12: 433-446. Antagonists to ncRNAs have been reported. Meng et al. 2015 Nature 518: 409-412; and Ling et al. 2013 Nature Rev. Drug Discov. 12: 847-865. In some embodiments, a composition comprises a biologically active agent and a lipid, wherein the biologically active agent is a nucleic acid or other antagonist to a ncRNA. In some embodiments, a composition comprises a lipid and a portion of a ncRNA capable of mediating at least one function of a ncRNA.

[0368] Optionally Substituted: As described herein, compounds, e.g., oligonucleotides, of the disclosure may contain optionally substituted and/or substituted moieties. In general, the term “substituted,” whether preceded by the term “optionally” or not, means that one or more hydrogens of the designated moiety are replaced with a suitable substituent. Unless otherwise indicated, an “optionally substituted” group may have a suitable substituent at each substitutable position of the group, and when more than one position in any given structure may be substituted with more than one substituent selected from a specified group, the substituent may be either the same or different at every position. In some embodiments, an optionally substituted group is unsubstituted. Combinations of substituents envisioned by this disclosure are preferably those that result in the formation of stable or chemically feasible compounds. The term “stable,” as used herein, refers to compounds that are not substantially altered when subjected to conditions to allow for their production, detection, and, in certain embodiments, their recovery, purification, and use for one or more of the purposes disclosed herein.

[0369] Suitable monovalent substituents include halogen; —(CH₂)₀₋₄R^{∘}; —(CH₂)₀₋₄OR^{∘}; —O(CH₂)₀₋₄R^{∘}, —O—(CH₂)₀₋₄C(O)OR^{∘}; —(CH₂)₀₋₄CH(OR^{∘})₂; —(CH₂)₀₋₄Ph, which may be substituted with R^{∘}; —(CH₂)₀₋₄O(CH₂)₀₋₁Ph which may be substituted with R^{∘}; —CH═CHPh, which may be substituted with R^{∘}; —(CH₂)₀₋₄O(CH₂)₀₋₁-pyridyl which may be substituted with R^{∘}; —NO₂; —CN; —N₃; —(CH₂)₀₋₄N(R^{∘})₂; —(CH₂)₀₋₄N(R^{∘})C(O)R^{∘}; —N(R^{∘})C(S)R^{∘}; —(CH₂)_{0- 4}N(R^{∘})C(O)NR^{∘}₂; —N(R^{∘})C(S)NR^{∘}₂; —(CH₂)₀₋₄N(R^{∘})C(O)OR^{∘}; —N(R^{∘})N(R^{∘})C(O)R^{∘}; —N(R^{∘})N(R^{∘})C(O)NR^{∘}₂; —N(R^{∘})N(R^{∘})C(O)OR^{∘}; —(CH₂)₀₋₄C(O)R^{∘}; —C(S)R^{∘}; —(CH₂)₀₋₄C(O)OR^{∘}; —(CH₂)₀₋₄C(O)SR^{∘}; —(CH₂)₀₋₄C(O)OSiR^{∘}₃; —(CH₂)₀₋₄C(O)R^{∘}; —OC(O)(CH₂)₀₋₄SR, —SC(S)SR^{∘}; —(CH₂)₀₋₄SC(O)R^{∘}; —(CH₂)₀₋₄C(O)NR^{∘}₂; —C(S)NR^{∘}₂; —C(S)SR^{∘}; —SC(S)SRO, —(CH₂)₀₋₄OC(O)NR^{∘}₂; —C(O)N(OR)R^{∘}; —C(O)C(O)R^{∘}; —C(O)CH₂C(O)R^{∘}; —C(NOR^{∘})R^{∘}; —(CH₂)₀₋₄SSR^{∘}; —(CH₂)₀₋₄S(O)₂R^{∘}; —(CH₂)₀₋₄S(O)₂OR^{∘}; —(CH₂)₀₋₄OS(O)₂R^{∘}; —S(O)₂NR^{∘}₂; —(CH₂)₀₋₄S(O)R^{∘}; —N(R^{∘})S(O)₂NR^{∘}₂; —N(R^{∘})S(O)₂R^{∘}; —N(OR^{∘})R^{∘}; —C(NH)NR^{∘}₂; —P(O)₂R^{∘}; —P(O)R^{∘}₂; —OP(O)R^{∘}₂; —OP(O)(OR^{∘})₂; —SiR^{∘}₃; —OSiR^{∘}₃; —(C₁₋₄ straight or branched alkylene)O—N(R^{∘})₂; or —(C₁₋₄ straight or branched alkylene)C(O)O—N(R^{∘})₂, wherein each R^{∘} may be substituted as defined below and is independently hydrogen, C₁₋₂₀ aliphatic, C₁₋₂₀ heteroaliphatic having 1-5 heteroatoms independently selected from nitrogen, oxygen, sulfur, silicon and phosphorus, —CH₂—(C₆₋₁₄ aryl), —O(CH₂)₀₋₁(C₆₋₁₄ aryl), —CH₂-(5-14 membered heteroaryl ring), a 5-20 membered, monocyclic, bicyclic, or polycyclic, saturated, partially unsaturated or aryl ring having 0-5 heteroatoms independently selected from nitrogen, oxygen, sulfur, silicon and phosphorus, or, notwithstanding the definition above, two independent occurrences of R^{∘}, taken together with their intervening atom(s), form a 5-20 membered, monocyclic, bicyclic, or polycyclic, saturated, partially unsaturated or aryl ring having 0-5 heteroatoms independently selected from nitrogen, oxygen, sulfur, silicon and phosphorus, which may be substituted as defined below.

[0370] Suitable monovalent substituents on R^{o} (or the ring formed by taking two independent occurrences of R^{•} together with their intervening atoms), are independently halogen, —(CH₂)₀₋₂R^{•}, -(haloR^{•}), —(CH₂)₀₋₂OH, —(CH₂)₀₋₂OR^{•}, —(CH₂)₀₋₂CH(OR^{•})₂; —O(haloR^{•}), —CN, —N₃, —(CH₂)₀₋₂C(O)R^{•}, —(CH₂)₀₋₂C(O)OH, —(CH₂)₀₋₂C(O)OR^{•}, —(CH₂)₀₋₂SR^{•}, —(CH₂)₀₋₂SH, —(CH₂)₀₋₂NH₂, —(CH₂)₀₋₂NHR^{•}, —(CH₂)₀₋₂NR^{•}₂, —NO₂, —SiR^{•}₃, —OSiR^{•}₃, —C(O)SR^{•}, —(C₁₋₄ straight or branched alkylene)C(O)OR^{•}, or —SSR^{•} wherein each R^{•} is unsubstituted or where preceded by “halo” is substituted only with one or more halogens, and is independently selected from C₁₋₄ aliphatic, —CH₂Ph, —O(CH₂)₀₋₁Ph, or a 5-6-membered saturated, partially unsaturated, or aryl ring having 0-4 heteroatoms independently selected from nitrogen, oxygen, and sulfur. Suitable divalent substituents on a saturated carbon atom of R^{°} include ═O and ═S.

[0371] Suitable divalent substituents include the following: ═O, ═S, ═NNR*₂, ═NNHC(O)R*, ═NNHC(O)OR*, ═NNHS(O)₂R*, ═NR*, ═NOR*, —O(C(R*₂))₂₋₃O—, or —S(C(R*₂))₂₋₃S—, wherein each independent occurrence of R* is selected from hydrogen, C₁₋₆ aliphatic which may be substituted as defined below, or an unsubstituted 5-6-membered saturated, partially unsaturated, or aryl ring having 0-4 heteroatoms independently selected from nitrogen, oxygen, and sulfur. Suitable divalent substituents that are bound to vicinal substitutable carbons of an “optionally substituted” group include: —O(CR*₂)₂₋₃O—, wherein each independent occurrence of R* is selected from hydrogen, C₁₋₆ aliphatic which may be substituted as defined below, or an unsubstituted 5-6-membered saturated, partially unsaturated, or aryl ring having 0-4 heteroatoms independently selected from nitrogen, oxygen, and sulfur.

[0372] Suitable substituents on the aliphatic group of R* include halogen, —R^{•}, -(haloR^{•}), —OH, —ORR^{•}, —O(haloRR^{•}), —CN, —C(O)OH, —C(O)ORR^{•}, —NH₂, —NHRR^{•}, —NRR^{•}₂, or —NO₂, wherein each R^{•} is unsubstituted or where preceded by “halo” is substituted only with one or more halogens, and is independently C₁₋₄ aliphatic, —CH₂Ph, —O(CH₂)₀₋₁Ph, or a 5-6-membered saturated, partially unsaturated, or aryl ring having 0-4 heteroatoms independently selected from nitrogen, oxygen, and sulfur.

[0373] In some embodiments, suitable substituents on a substitutable nitrogen include —R^{†}, —NR^{†}₂, —C(O)R^{†}, —C(O)OR^{†}, —C(O)C(O)R^{†}, —C(O)CH₂C(O)R^{†}, —S(O)₂R^{†}, —S(O)₂NR^{†}₂, —C(S)NR^{†}₂, —C(NH)NR^{†}₂, or —N(R)S(O)₂R^{†}; wherein each R^{†} is independently hydrogen, C₁₋₆ aliphatic which may be substituted as defined below, unsubstituted —OPh, or an unsubstituted 5-6-membered saturated, partially unsaturated, or aryl ring having 0-4 heteroatoms independently selected from nitrogen, oxygen, and sulfur, or, notwithstanding the definition above, two independent occurrences of R^{†}, taken together with their intervening atom(s) form an unsubstituted 3-12-membered saturated, partially unsaturated, or aryl mono- or bicyclic ring having 0-4 heteroatoms independently selected from nitrogen, oxygen, and sulfur.

[0374] Suitable substituents on the aliphatic group of R^{\} are independently halogen, —R^{•}, -(haloR^{•}), —OH, —R^{•}, —O(haloR^{•}), —CN, —C(O)OH, —C(O)OR^{•}, —NH₂, —NHR^{•}, —NR^{•}₂, or —NO₂, wherein each R^{•} is unsubstituted or where preceded by “halo” is substituted only with one or more halogens, and is independently C₁₋₄ aliphatic, —CH₂Ph, —O(CH₂)₀₋₁Ph, or a 5-6-membered saturated, partially unsaturated, or aryl ring having 0-4 heteroatoms independently selected from nitrogen, oxygen, and sulfur.

[0375] Oral: The phrases “oral administration” and “administered orally” as used herein have their art-understood meaning referring to administration by mouth of a compound or composition.

[0376] Parenteral: The phrases “parenteral administration” and “administered parenterally” as used herein have their art-understood meaning referring to modes of administration other than enteral and topical administration, usually by injection, and include, without limitation, intravenous, intramuscular, intraarterial, intrathecal, intracapsular, intraorbital, intracardiac, intradermal, intraperitoneal, transtracheal, subcutaneous, subcuticular, intraarticulare, subcapsular, subarachnoid, intraspinal, and intrasternal injection and infusion.

[0377] Partially unsaturated: As used herein, the term “partially unsaturated” refers to a moiety that includes at least one double or triple bond. The term “partially unsaturated” is intended to encompass groups having multiple sites of unsaturation, but is not intended to include aryl or heteroaryl moieties.

[0378] Peptide: The term “peptide”, as used herein, refers to a molecule comprising a plurality of amino acids joined together via peptide bonds. In some embodiments, a peptide includes a dipeptide, tripeptide, oligopeptide and polypeptide. In some embodiments, a dipeptide contains two amino acids; a tripeptide contains three amino acids; and an oligopeptide comprises about 2 to about 50 or more amino acids. In some embodiments, peptides comprise more than about 50 amino acids. In some embodiments, a polypeptide and a protein are also molecules comprising a plurality of amino acids joined together via peptide bonds. In some embodiments, a peptide includes any therapeutic peptide listed in the SATPdb database of therapeutic peptides. Singh et al. 2015 Nucl. Acids Res. doi: 10.1093/nar/gkv1114. In some embodiments, a composition comprises a lipid and a portion of a peptide capable of mediating at least one function of a peptide.

[0379] Pharmaceutical composition: As used herein, the term “pharmaceutical composition” refers to an active agent, formulated together with one or more pharmaceutically acceptable carriers. In some embodiments, active agent is present in unit dose amount appropriate for administration in a therapeutic regimen that shows a statistically significant probability of achieving a predetermined therapeutic effect when administered to a relevant population. In some embodiments, pharmaceutical compositions may be specially formulated for administration in solid or liquid form, including those adapted for the following: oral administration, for example, drenches (aqueous or non-aqueous solutions or suspensions), tablets, e.g., those targeted for buccal, sublingual, and systemic absorption, boluses, powders, granules, pastes for application to the tongue; parenteral administration, for example, by subcutaneous, intramuscular, intravenous or epidural injection as, for example, a sterile solution or suspension, or sustained-release formulation; topical application, for example, as a cream, ointment, or a controlled-release patch or spray applied to the skin, lungs, or oral cavity; intravaginally or intrarectally, for example, as a pessary, cream, or foam; sublingually; ocularly; transdermally; or nasally, pulmonary, and to other mucosal surfaces.

[0380] Pharmaceutically acceptable: As used herein, the phrase “pharmaceutically acceptable” refers to those compounds, materials, compositions, and/or dosage forms which are, within the scope of sound medical judgment, suitable for use in contact with the tissues of human beings and animals without excessive toxicity, irritation, allergic response, or other problem or complication, commensurate with a reasonable benefit/risk ratio.

[0381] Pharmaceutically acceptable carrier: As used herein, the term “pharmaceutically acceptable carrier” means a pharmaceutically-acceptable material, composition or vehicle, such as a liquid or solid filler, diluent, excipient, or solvent encapsulating material, involved in carrying or transporting the subject compound from one organ, or portion of the body, to another organ, or portion of the body. Each carrier must be “acceptable” in the sense of being compatible with the other ingredients of the formulation and not injurious to the patient. Some examples of materials which can serve as pharmaceutically-acceptable carriers include: sugars, such as lactose, glucose and sucrose; starches, such as corn starch and potato starch; cellulose, and its derivatives, such as sodium carboxymethyl cellulose, ethyl cellulose and cellulose acetate; powdered tragacanth; malt; gelatin; talc; excipients, such as cocoa butter and suppository waxes; oils, such as peanut oil, cottonseed oil, safflower oil, sesame oil, olive oil, corn oil and soybean oil; glycols, such as propylene glycol; polyols, such as glycerin, sorbitol, mannitol and polyethylene glycol; esters, such as ethyl oleate and ethyl laurate; agar; buffering agents, such as magnesium hydroxide and aluminum hydroxide; alginic acid; pyrogen-free water; isotonic saline; Ringer's solution; ethyl alcohol; pH buffered solutions; polyesters, polycarbonates and/or polyanhydrides; and other non-toxic compatible substances employed in pharmaceutical formulations.

[0382] Pharmaceutically acceptable salt: The term “pharmaceutically acceptable salt”, as used herein, refers to salts of such compounds that are appropriate for use in pharmaceutical contexts, i.e., salts which are, within the scope of sound medical judgment, suitable for use in contact with the tissues of humans and lower animals without undue toxicity, irritation, allergic response and the like, and are commensurate with a reasonable benefit/risk ratio. Pharmaceutically acceptable salts are well known in the art. For example, S. M. Berge, et al. describes pharmaceutically acceptable salts in detail in J. Pharmaceutical Sciences, 66: 1-19 (1977). In some embodiments, pharmaceutically acceptable salt include, but are not limited to, nontoxic acid addition salts, which are salts of an amino group formed with inorganic acids such as hydrochloric acid, hydrobromic acid, phosphoric acid, sulfuric acid and perchloric acid or with organic acids such as acetic acid, maleic acid, tartaric acid, citric acid, succinic acid or malonic acid or by using other methods used in the art such as ion exchange. In some embodiments, pharmaceutically acceptable salts include, but are not limited to, adipate, alginate, ascorbate, aspartate, benzenesulfonate, benzoate, bisulfate, borate, butyrate, camphorate, camphorsulfonate, citrate, cyclopentanepropionate, digluconate, dodecylsulfate, ethanesulfonate, formate, fumarate, glucoheptonate, glycerophosphate, gluconate, hemisulfate, heptanoate, hexanoate, hydroiodide, 2-hydroxy-ethanesulfonate, lactobionate, lactate, laurate, lauryl sulfate, malate, maleate, malonate, methanesulfonate, 2-naphthalenesulfonate, nicotinate, nitrate, oleate, oxalate, palmitate, pamoate, pectinate, persulfate, 3-phenylpropionate, phosphate, picrate, pivalate, propionate, stearate, succinate, sulfate, tartrate, thiocyanate, p-toluenesulfonate, undecanoate, valerate salts, and the like. Representative alkali or alkaline earth metal salts include sodium, lithium, potassium, calcium, magnesium, and the like. In some embodiments, pharmaceutically acceptable salts include, when appropriate, nontoxic ammonium, quaternary ammonium, and amine cations formed using counterions such as halide, hydroxide, carboxylate, sulfate, phosphate, nitrate, alkyl having from 1 to 6 carbon atoms, sulfonate and aryl sulfonate.

[0383] Plasmid: The term “plasmid”, as used herein, refers to an extra-chromosomal (apart from a chromosome) length of DNA; plasmids are generally circular and generally capable of independent replication, though exceptions exist such as linear plasmids and plasmids which are not capable of independent replication (including, but not limited to, suicide vectors). In some embodiments, a plasmid can be extra-chromosomal under some conditions (e.g., in a laboratory), but capable of integrating into a chromosome (e.g., acting as a suicide vector capable of integrating into a chromosome in a cell or subject). Plasmids naturally exist in many organisms, including bacteria and some eukaryotic organisms, and are commonly engineered and produced artificially to carry genes into an organism. A plasmid is generally double-stranded, or can alternatively be single-stranded or partially single- and double-stranded, or have other strandedness. Artificial plasmids are commonly used in genetic engineering. Plasmids include plasmids encoding or capable of expressing a nucleic acid, including, without limitation, a mRNA, a RNAi agent or precursor thereof, an antagonist to another nucleic acid (including, without limitation, an antagonist to a miRNA, RNAi agent, mRNA, etc.) or precursor thereof, or other nucleic acids of therapeutic benefit. Additional parts of a plasmid can optionally include one or more copies of any one or more component selected from: a gene encoding a protein related to replication, an origin or replication, a gene encoding a replication initiator protein, an origin of replication enhancer, a gene encoding a nucleic acid of therapeutic benefit (or a precursor thereof), one or multiple promoters, one or multiple transcription enhancers, one or multiple transcription terminators, one or more marker genes (e.g., a gene encoding resistance to an antibiotic or encoding an enzyme required for survival and/or growth under certain laboratory conditions). In some embodiments, a plasmid is a suicide vector, which can lack any of: an origin of replication, a gene encoding a DNA replication initiator protein, or any other component required for independent replication. In some embodiments, two plasmids can be physically separate, but produce products which work in concert; for example, one plasmid can encode a gene for a transcriptional enhancer which enhances transcription of a gene encoded on another plasmid; for another example, one plasmid can comprise a gene encoding a DNA replication initiator protein which initiates replication at a DNA replication origin on another plasmid. Various plasmids are known in the art. In some embodiments, a composition comprises a lipid and a portion of a plasmid capable of mediating at least one function of a plasmid.

[0384] Protecting group: The term “protecting group,” as used herein, is well known in the art and includes those described in detail in Protecting Groups in Organic Synthesis, T. W. Greene and P. G. M. Wuts, 3^{rd} edition, John Wiley & Sons, 1999, the entirety of which is incorporated herein by reference. Also included are those protecting groups specially adapted for nucleoside and nucleotide chemistry described in Current Protocols in Nucleic Acid Chemistry, edited by Serge L. Beaucage et al. 06/2012, the entirety of Chapter 2 is incorporated herein by reference. Suitable amino-protecting groups include methyl carbamate, ethyl carbamante, 9-fluorenylmethyl carbamate (Fmoc), 9-(2-sulfo)fluorenylmethyl carbamate, 9-(2,7-dibromo)fluoroenylmethyl carbamate, 2,7-di-t-butyl-[9-(10,10-dioxo-10,10,10,10-tetrahydrothioxanthyl)]methyl carbamate (DBD-Tmoc), 4-methoxyphenacyl carbamate (Phenoc), 2,2,2-trichloroethyl carbamate (Troc), 2-trimethylsilylethyl carbamate (Teoc), 2-phenylethyl carbamate (hZ), 1-(1-adamantyl)-1-methylethyl carbamate (Adpoc), 1,1-dimethyl-2-haloethyl carbamate, 1,1-dimethyl-2,2-dibromoethyl carbamate (DB-t-BOC), 1,1-dimethyl-2,2,2-trichloroethyl carbamate (TCBOC), 1-methyl-1-(4-biphenylyl)ethyl carbamate (Bpoc), 1-(3,5-di-t-butylphenyl)-1-methylethyl carbamate (t-Bumeoc), 2-(2′- and 4′-pyridyl)ethyl carbamate (Pyoc), 2-(N,N-dicyclohexylcarboxamido)ethyl carbamate, t-butyl carbamate (BOC), 1-adamantyl carbamate (Adoc), vinyl carbamate (Voc), allyl carbamate (Alloc), 1-isopropylallyl carbamate (Ipaoc), cinnamyl carbamate (Coc), 4-nitrocinnamyl carbamate (Noc), 8-quinolyl carbamate, N-hydroxypiperidinyl carbamate, alkyldithio carbamate, benzyl carbamate (Cbz), p-methoxybenzyl carbamate (Moz), p-nitobenzyl carbamate, p-bromobenzyl carbamate, p-chlorobenzyl carbamate, 2,4-dichlorobenzyl carbamate, 4-methylsulfinylbenzyl carbamate (Msz), 9-anthrylmethyl carbamate, diphenylmethyl carbamate, 2-methylthioethyl carbamate, 2-methyl sulfonylethyl carbamate, 2-(p-toluenesulfonyl)ethyl carbamate, [2-(1,3-dithianyl)]methyl carbamate (Dmoc), 4-methylthiophenyl carbamate (Mtpc), 2,4-dimethylthiophenyl carbamate (Bmpc), 2-phosphonioethyl carbamate (Peoc), 2-triphenylphosphonioisopropyl carbamate (Ppoc), 1,1-dimethyl-2-cyanoethyl carbamate, m-chloro-p-acyloxybenzyl carbamate, p-(dihydroxyboryl)benzyl carbamate, 5-benzisoxazolylmethyl carbamate, 2-(trifluoromethyl)-6-chromonylmethyl carbamate (Tcroc), m-nitrophenyl carbamate, 3,5-dimethoxybenzyl carbamate, o-nitrobenzyl carbamate, 3,4-dimethoxy-6-nitrobenzyl carbamate, phenyl(o-nitrophenyl)methyl carbamate, phenothiazinyl-(10)-carbonyl derivative, N′-p-toluenesulfonylaminocarbonyl derivative, N′-phenylaminothiocarbonyl derivative, t-amyl carbamate, S-benzyl thiocarbamate, p-cyanobenzyl carbamate, cyclobutyl carbamate, cyclohexyl carbamate, cyclopentyl carbamate, cyclopropylmethyl carbamate, p-decyloxybenzyl carbamate, 2,2-dimethoxycarbonylvinyl carbamate, o-(N,N-dimethylcarboxamido)benzyl carbamate, 1,1-dimethyl-3-(N,N-dimethylcarboxamido)propyl carbamate, 1,1-dimethylpropynyl carbamate, di(2-pyridyl)methyl carbamate, 2-furanylmethyl carbamate, 2-iodoethyl carbamate, isoborynl carbamate, isobutyl carbamate, isonicotinyl carbamate, p-(p′-methoxyphenylazo)benzyl carbamate, 1-methylcyclobutyl carbamate, 1-methylcyclohexyl carbamate, 1-methyl-1-cyclopropylmethyl carbamate, 1-methyl-1-(3,5-dimethoxyphenyl)ethyl carbamate, 1-methyl-1-(p-phenylazophenyl)ethyl carbamate, 1-methyl-1-phenylethyl carbamate, 1-methyl-1-(4-pyridyl)ethyl carbamate, phenyl carbamate, p-(phenylazo)benzyl carbamate, 2,4,6-tri-t-butylphenyl carbamate, 4-(trimethylammonium)benzyl carbamate, 2,4,6-trimethylbenzyl carbamate, formamide, acetamide, chloroacetamide, trichloroacetamide, trifluoroacetamide, phenylacetamide, 3-phenylpropanamide, picolinamide, 3-pyridylcarboxamide, N-benzoylphenylalanyl derivative, benzamide, p-phenylbenzamide, o-nitophenylacetamide, o-nitrophenoxyacetamide, acetoacetamide, (N′-dithiobenzyloxycarbonylamino)acetamide, 3-(p-hydroxyphenyl)propanamide, 3-(o-nitrophenyl)propanamide, 2-methyl-2-(o-nitrophenoxy)propanamide, 2-methyl-2-(o-phenylazophenoxy)propanamide, 4-chlorobutanamide, 3-methyl-3-nitrobutanamide, o-nitrocinnamide, N-acetylmethionine derivative, o-nitrobenzamide, o-(benzoyloxymethyl)benzamide, 4,5-diphenyl-3-oxazolin-2-one, N-phthalimide, N-dithiasuccinimide (Dts), N-2,3-diphenylmaleimide, N-2,5-dimethylpyrrole, N-1,1,4,4-tetramethyldisilylazacyclopentane adduct (STABASE), 5-substituted 1,3-dimethyl-1,3,5-triazacyclohexan-2-one, 5-substituted 1,3-dibenzyl-1,3,5-triazacyclohexan-2-one, 1-substituted 3,5-dinitro-4-pyridone, N-methylamine, N-allylamine, N-[2-(trimethyl silyl)ethoxy]methylamine (SEM), N-3-acetoxypropylamine, N-(1-isopropyl-4-nitro-2-oxo-3-pyroolin-3-yl)amine, quaternary ammonium salts, N-benzylamine, N-di(4-methoxyphenyl)methylamine, N-5-dibenzosuberylamine, N-triphenylmethylamine (Tr), N-[(4-methoxyphenyl)diphenylmethyl]amine (MMTr), N-9-phenylfluorenylamine (PhF), N-2,7-dichloro-9-fluorenylmethyleneamine, N-ferrocenylmethylamino (Fcm), N-2-picolylamino N′-oxide, N-1,1-dimethylthiomethyleneamine, N-benzylideneamine, N-p-methoxybenzylideneamine, N-diphenylmethyleneamine, N-[(2-pyridyl)mesityl]methyleneamine, N—(N′,N′-dimethylaminomethylene)amine, N,N′-isopropylidenediamine, N-p-nitrobenzylideneamine, N-salicylideneamine, N-5-chlorosalicylideneamine, N-(5-chloro-2-hydroxyphenyl)phenylmethyleneamine, N-cyclohexylideneamine, N-(5,5-dimethyl-3-oxo-1-cyclohexenyl)amine, N-borane derivative, N-diphenylborinic acid derivative, N-[phenyl(pentacarbonylchromium- or tungsten)carbonyl]amine, N-copper chelate, N-zinc chelate, N-nitroamine, N-nitrosoamine, amine N-oxide, diphenylphosphinamide (Dpp), dimethylthiophosphinamide (Mpt), diphenylthiophosphinamide (Ppt), dialkyl phosphoramidates, dibenzyl phosphoramidate, diphenyl phosphoramidate, benzenesulfenamide, o-nitrobenzenesulfenamide (Nps), 2,4-dinitrob enzenesulfenamide, pentachlorobenzenesulfenamide, 2-nitro-4-methoxybenzenesulfenamide, triphenylmethylsulfenamide, 3-nitropyridinesulfenamide (Npys), p-toluenesulfonamide (Ts), benzenesulfonamide, 2,3,6,-trimethyl-4-methoxybenzenesulfonamide (Mtr), 2,4,6-trimethoxybenzenesulfonamide (Mtb), 2,6-dimethyl-4-methoxybenzenesulfonamide (Pme), 2,3,5,6-tetramethyl-4-methoxybenzenesulfonamide (Mte), 4-methoxybenzenesulfonamide (Mbs), 2,4,6-trimethylbenzenesulfonamide (Mts), 2,6-dimethoxy-4-methylbenzenesulfonamide (iMds), 2,2,5,7,8-pentamethylchroman-6-sulfonamide (Pmc), methanesulfonamide (Ms), β-trimethyl silylethanesulfonamide (SES), 9-anthracenesulfonamide, 4-(4′,8′-dimethoxynaphthylmethyl)benzenesulfonamide (DNMBS), benzylsulfonamide, trifluoromethylsulfonamide, and phenacylsulfonamide.

[0385] Suitably protected carboxylic acids further include, but are not limited to, silyl-, alkyl-, alkenyl-, aryl-, and arylalkyl-protected carboxylic acids. Examples of suitable silyl groups include trimethylsilyl, triethylsilyl, t-butyldimethylsilyl, t-butyldiphenylsilyl, triisopropylsilyl, and the like. Examples of suitable alkyl groups include methyl, benzyl, p-methoxybenzyl, 3,4-dimethoxybenzyl, trityl, t-butyl, tetrahydropyran-2-yl. Examples of suitable alkenyl groups include allyl. Examples of suitable aryl groups include optionally substituted phenyl, biphenyl, or naphthyl. Examples of suitable arylalkyl groups include optionally substituted benzyl (e.g., p-methoxybenzyl (MPM), 3,4-dimethoxybenzyl, 0-nitrobenzyl, p-nitrobenzyl, p-halobenzyl, 2,6-dichlorobenzyl, p-cyanobenzyl), and 2- and 4-picolyl.

[0386] Suitable hydroxyl protecting groups include methyl, methoxylmethyl (MOM), methylthiomethyl (MTM), t-butylthiomethyl, (phenyldimethylsilyl)methoxymethyl (SMOM), benzyloxymethyl (BOM), p-methoxybenzyloxymethyl (PMBM), (4-methoxyphenoxy)methyl (p-AOM), guaiacolmethyl (GUM), t-butoxymethyl, 4-pentenyloxymethyl (POM), siloxymethyl, 2-methoxyethoxymethyl (MEM), 2,2,2-trichloroethoxymethyl, bis(2-chloroethoxy)methyl, 2-(trimethylsilyl)ethoxymethyl (SEMOR), tetrahydropyranyl (THP), 3-bromotetrahydropyranyl, tetrahydrothiopyranyl, 1-methoxycyclohexyl, 4-methoxytetrahydropyranyl (MTHP), 4-methoxytetrahydrothiopyranyl, 4-methoxytetrahydrothiopyranyl S,S-dioxide, 1-[(2-chloro-4-methyl)phenyl]-4-methoxypiperidin-4-yl (CTMP), 1,4-dioxan-2-yl, tetrahydrofuranyl, tetrahydrothiofuranyl, 2,3,3a,4,5,6,7,7a-octahydro-7,8,8-trimethyl-4,7-methanobenzofuran-2-yl, 1-ethoxyethyl, 1-(2-chloroethoxy)ethyl, 1-methyl-1-methoxyethyl, 1-methyl-1-benzyloxyethyl, 1-methyl-1-benzyloxy-2-fluoroethyl, 2,2,2-trichloroethyl, 2-trimethyl silylethyl, 2-(phenylselenyl)ethyl, t-butyl, allyl, p-chlorophenyl, p-methoxyphenyl, 2,4-dinitrophenyl, benzyl, p-methoxybenzyl, 3,4-dimethoxybenzyl, o-nitrobenzyl, p-nitrobenzyl, p-halobenzyl, 2,6-dichlorobenzyl, p-cyanobenzyl, p-phenylbenzyl, 2-picolyl, 4-picolyl, 3-methyl-2-picolyl N-oxido, diphenylmethyl, p,p′-dinitrobenzhydryl, 5-dibenzosuberyl, triphenylmethyl, a-naphthyldiphenylmethyl, p-methoxyphenyldiphenylmethyl, di(p-methoxyphenyl)phenylmethyl, tri(p-methoxyphenyl)methyl, 4-(4′-bromophenacyloxyphenyl)diphenylmethyl, 4,4′,4″-tris(4,5-dichlorophthalimidophenyl)methyl, 4,4′,4″-tris(levulinoyloxyphenyl)methyl, 4,4′,4″-tris(benzoyloxyphenyl)methyl, 3-(imidazol-1-yl)bis(4′,4‘ ’-dimethoxyphenyl)methyl, 1,1-bis(4-methoxyphenyl)-1′-pyrenylmethyl, 9-anthryl, 9-(9-phenyl)xanthenyl, 9-(9-phenyl-10-oxo)anthryl, 1,3-benzodithiolan-2-yl, benzisothiazolyl S,S-dioxido, trimethylsilyl (TMS), triethylsilyl (TES), triisopropylsilyl (TIPS), dimethylisopropylsilyl (IPDMS), diethylisopropylsilyl (DEIPS), dimethylthexylsilyl, t-butyldimethylsilyl (TBDMS), t-butyldiphenylsilyl (TBDPS), tribenzylsilyl, tri-p-xylylsilyl, triphenylsilyl, diphenylmethylsilyl (DPMS), t-butylmethoxyphenylsilyl (TBMPS), formate, benzoylformate, acetate, chloroacetate, dichloroacetate, trichloroacetate, trifluoroacetate, methoxyacetate, triphenylmethoxyacetate, phenoxyacetate, p-chlorophenoxyacetate, 3-phenylpropionate, 4-oxopentanoate (levulinate), 4,4-(ethylenedithio)pentanoate (levulinoyldithioacetal), pivaloate, adamantoate, crotonate, 4-methoxycrotonate, benzoate, p-phenylbenzoate, 2,4,6-trimethylbenzoate (mesitoate), alkyl methyl carbonate, 9-fluorenylmethyl carbonate (Fmoc), alkyl ethyl carbonate, alkyl 2,2,2-trichloroethyl carbonate (Troc), 2-(trimethylsilyl)ethyl carbonate (TMSEC), 2-(phenylsulfonyl) ethyl carbonate (Psec), 2-(triphenylphosphonio) ethyl carbonate (Peoc), alkyl isobutyl carbonate, alkyl vinyl carbonate alkyl allyl carbonate, alkyl p-nitrophenyl carbonate, alkyl benzyl carbonate, alkyl p-methoxybenzyl carbonate, alkyl 3,4-dimethoxybenzyl carbonate, alkyl o-nitrobenzyl carbonate, alkyl p-nitrobenzyl carbonate, alkyl S-benzyl thiocarbonate, 4-ethoxy-1-napththyl carbonate, methyl dithiocarbonate, 2-iodobenzoate, 4-azidobutyrate, 4-nitro-4-methylpentanoate, o-(dibromomethyl)benzoate, 2-formylbenzenesulfonate, 2-(methylthiomethoxy)ethyl, 4-(methylthiomethoxy)butyrate, 2-(methylthiomethoxymethyl)benzoate, 2,6-dichloro-4-methylphenoxyacetate, 2,6-dichloro-4-(1,1,3,3-tetramethylbutyl)phenoxyacetate, 2,4-bis(1,1-dimethylpropyl)phenoxyacetate, chlorodiphenylacetate, isobutyrate, monosuccinoate, (E)-2-methyl-2-butenoate, o-(methoxycarbonyl)benzoate, a-naphthoate, nitrate, alkyl N,N,N′,N′ tetramethylphosphorodiamidate, alkyl N-phenylcarbamate, borate, dimethylphosphinothioyl, alkyl 2,4-dinitrophenylsulfenate, sulfate, methanesulfonate (mesylate), benzylsulfonate, and tosylate (Ts). For protecting 1,2- or 1,3-diols, the protecting groups include methylene acetal, ethylidene acetal, 1-t-butylethylidene ketal, 1-phenylethylidene ketal, (4-methoxyphenyl)ethylidene acetal, 2,2,2-trichloroethylidene acetal, acetonide, cyclopentylidene ketal, cyclohexylidene ketal, cycloheptylidene ketal, benzylidene acetal, p-methoxybenzylidene acetal, 2,4-dimethoxybenzylidene ketal, 3,4-dimethoxybenzylidene acetal, 2-nitrobenzylidene acetal, methoxymethylene acetal, ethoxymethylene acetal, dimethoxymethylene ortho ester, 1-methoxyethylidene ortho ester, 1-ethoxyethylidine ortho ester, 1,2-dimethoxyethylidene ortho ester, α-methoxybenzylidene ortho ester, 1-(N,N-dimethylamino)ethylidene derivative, α-(N,N′-dimethylamino)benzylidene derivative, 2-oxacyclopentylidene ortho ester, di-t-butylsilylene group (DTBS), 1,3-(1,1,3,3-tetraisopropyldisiloxanylidene) derivative (TIPDS), tetra-t-butoxydisiloxane-1,3-diylidene derivative (TBDS), cyclic carbonates, cyclic boronates, ethyl boronate, and phenyl boronate.

[0387] In some embodiments, a hydroxyl protecting group is acetyl, t-butyl, t-butoxymethyl, methoxymethyl, tetrahydropyranyl, 1-ethoxyethyl, 1-(2-chloroethoxy)ethyl, 2-trimethyl silylethyl, p-chlorophenyl, 2,4-dinitrophenyl, benzyl, benzoyl, p-phenylbenzoyl, 2,6-dichlorobenzyl, diphenylmethyl, p-nitrobenzyl, triphenylmethyl (trityl), 4,4′-dimethoxytrityl, trimethylsilyl, triethylsilyl, t-butyldimethylsilyl, t-butyldiphenylsilyl, triphenylsilyl, triisopropylsilyl, benzoylformate, chloroacetyl, trichloroacetyl, trifiuoroacetyl, pivaloyl, 9-fluorenylmethyl carbonate, mesylate, tosylate, triflate, trityl, monomethoxytrityl (MMTr), 4,4′-dimethoxytrityl, (DMTr) and 4,4′,4″-trimethoxytrityl (TMTr), 2-cyanoethyl (CE or Cne), 2-(trimethylsilyl)ethyl (TSE), 2-(2-nitrophenyl)ethyl, 2-(4-cyanophenyl)ethyl 2-(4-nitrophenyl)ethyl (NPE), 2-(4-nitrophenyl sulfonyl)ethyl, 3,5-dichlorophenyl, 2,4-dimethylphenyl, 2-nitrophenyl, 4-nitrophenyl, 2,4,6-trimethylphenyl, 2-(2-nitrophenyl)ethyl, butylthiocarbonyl, 4,4′,4″-tris(benzoyloxy)trityl, diphenylcarbamoyl, levulinyl, 2-(dibromomethyl)benzoyl (Dbmb), 2-(isopropylthiomethoxymethyl)benzoyl (Ptmt), 9-phenylxanthen-9-yl (pixyl) or 9-(p-methoxyphenyl)xanthine-9-yl (MOX). In some embodiments, each of the hydroxyl protecting groups is, independently selected from acetyl, benzyl, t-butyldimethylsilyl, t-butyldiphenylsilyl and 4,4′-dimethoxytrityl. In some embodiments, the hydroxyl protecting group is selected from the group consisting of trityl, monomethoxytrityl and 4,4′-dimethoxytrityl group.

[0388] In some embodiments, a phosphorous protecting group is a group attached to the internucleotide phosphorous linkage throughout oligonucleotide synthesis. In some embodiments, the phosphorous protecting group is attached to the sulfur atom of the internucleotide phosphorothioate linkage. In some embodiments, the phosphorous protecting group is attached to the oxygen atom of the internucleotide phosphorothioate linkage. In some embodiments, the phosphorous protecting group is attached to the oxygen atom of the internucleotide phosphate linkage. In some embodiments the phosphorous protecting group is 2-cyanoethyl (CE or Cne), 2-trimethylsilylethyl, 2-nitroethyl, 2-sulfonylethyl, methyl, benzyl, o-nitrobenzyl, 2-(p-nitrophenyl)ethyl (NPE or Npe), 2-phenylethyl, 3-(N-tert-butylcarboxamido)-1-propyl, 4-oxopentyl, 4-methylthio-1-butyl, 2-cyano-1,1-dimethylethyl, 4-N-methylaminobutyl, 3-(2-pyridyl)-1-propyl, 2-[N-methyl-N-(2-pyridyl)]aminoethyl, 2-(N-formyl,N-methyl)aminoethyl, 4-[N-methyl-N-(2,2,2-trifluoroacetyl)amino]butyl.

[0389] Protein: As used herein, the term “protein” refers to a polypeptide (i.e., a string of at least two amino acids linked to one another by peptide bonds). In some embodiments, proteins include only naturally-occurring amino acids. In some embodiments, proteins include one or more non-naturally-occurring amino acids (e.g., moieties that form one or more peptide bonds with adjacent amino acids). In some embodiments, one or more residues in a protein chain contain a non-amino-acid moiety (e.g., a glycan, etc). In some embodiments, a protein includes more than one polypeptide chain, for example linked by one or more disulfide bonds or associated by other means. In some embodiments, proteins contain L-amino acids, D-amino acids, or both; in some embodiments, proteins contain one or more amino acid modifications or analogs known in the art. Useful modifications include, e.g., terminal acetylation, amidation, methylation, etc. The term “peptide” is generally used to refer to a polypeptide having a length of less than about 100 amino acids, less than about 50 amino acids, less than 20 amino acids, or less than 10 amino acids. In some embodiments, proteins are antibodies, antibody fragments, biologically active portions thereof, and/or characteristic portions thereof.

[0390] Ribozymes: The term “ribozyme”, as used herein, refers to a catalytic RNA that functions as an enzyme and does not require proteins for catalysis. In some embodiments, a ribozyme is a self-processing RNA that catalyzes RNA cleavage and ligation reactions. In some embodiments, a substrate recognition domain of a ribozyme is artificially engineered to stimulate site-specific cleavage in cis (the same nucleic acid strand) or trans (a non-covalently linked nucleic acid). Scherer et al. 2003 Nat Biotechnol. 21:1457-1465. In some embodiments, a ribozyme is subject to in vitro selection and directed evolution to generate improved properties and new functions for therapeutic and diagnostic reagents. In some embodiments, a ribozyme is engineered to be allosterically activated by effector molecules, which has led to the development of artificial “riboswitches” as biosensors and synthetic biological tools. Wieland et al. 2010 Chem Biol. 17:236-242; Liang et al. 2011 Mol Cell. 43:915-926. In some embodiments, a ribozyme is derived from a “hammerhead” or “hairpin/paperclip” motifs. In some embodiments, a ribozyme is delivered to the target cells in RNA form or can be transcribed from therapeutic genes. In some embodiments, a ribozyme is chemically modified with any one or more of the following modifications: 5′-PS backbone linkage, 2′-O-Me, 2′-deoxy-2′-C-allyl uridine, and terminal inverted 3′-3′ deoxyabasic nucleotides. A non-limiting example of a ribozyme is Angiozyme (RPI.4610), which targets the mRNA of the vascular endothelial growth factor receptor-1 (VEGFR-1) to block angiogenesis and tumor growth. Kobayashi et al. 2005 Cancer Chemother Pharmacol. 56:329-336; Weng et al. 2005 Mol Cancer Ther. 4:948-955. Another non-limiting example of a ribozyme is Heptazyme, a synthetic ribozyme against hepatitis C virus (HCV). Sandberg et al. 2001 Hepatology 34:333a-333a; Tong et al. 2002 Hepatology 36:360a-360a; Berk 2006 Hepatology 43:S13-S30. In some embodiments, Ribozymes include those that target any of: VEGFR-1, HCV IRES, HIV U5 and pol, HIV Tat and Vpr, CCR5, HIV Tat and Rev. In some embodiments, a composition comprises a lipid and a portion of a ribozyme capable of mediating at least one function of a ribozyme.

[0391] RNAi agent: The term “RNAi agent”, as used herein, refers to a molecule capable of mediating RNA interference. The term encompasses a variety of structures and formats, including, as a non-limiting example, siRNAs (including but not limited to those of the “canonical” structure), in addition to various natural and artificial structures capable of mediating RNA interference. The term “RNA interference” or “RNAi”, as used herein, refers to a post-transcriptional, targeted gene-silencing technique that uses a RNAi agent to degrade messenger RNA (mRNA) containing a sequence which is the same as or very similar to the RNAi agent. See: Zamore and Haley, 2005, Science, 309, 1519-1524; Zamore et al., 2000, Cell, 101, 25-33; Elbashir et al., 2001, Nature, 41 1, 494-498; and Kreutzer et al., PCT Publication WO 00/44895; Fire, PCT Publication WO 99/32619; Mello and Fire, PCT Publication WO 01/29058; and the like. The process of RNAi occurs naturally when long dsRNA is introduced into a cell and cleaved by ribonuclease III (Dicer) into shorter fragments called siRNAs. Naturally produced siRNAs are typically about 21 nucleotides long and comprise about 19 base pair duplexes with two 2-nt overhangs (the “canonical” structure). One strand of the siRNA is reportedly incorporated into the RNA-induced silencing complex (RISC). This strand (known as the anti-sense or guide strand strand) guides RISC to a complementary mRNA. One or more nucleases in the RISC then reportedly mediates cleavage of the target mRNA to induce silencing. Cleavage of the target RNA reportedly takes place in the middle of the region complementary to the anti-sense strand. See: Nykanen, et al. 2001 Cell 107:309; Sharp et al. 2001 Genes Dev. 15:485; Bernstein, et al. 2001 Nature 409:363; Elbashir, et al. 2001 Genes Dev. 15:188. As various non-limiting examples, a RNAi agent includes: siRNAs (including but not limited to those of the canonical structure), shRNAs, miRNAs, sisiRNAs, meroduplex RNAs (mdRNAs), DNA-RNA chimeras, siRNAs comprising two mismatches (or more mismatches), neutral siRNAs, aiRNAs, or a siRNA comprising a terminal or internal spacer (e.g., an 18-mer format siRNA). In various non-limiting examples, the RNAi agent is a shRNA (small hairpin RNA or short hairpin RNA), which reportedly comprises a sequence of RNA that makes a tight hairpin turn and, like siRNAs, silences targets via RISC. The antisense and sense strand are thus reportedly connected by a hairpin. shRNAs reportedly can be expressed, for example, via delivery of plasmids or through viral or bacterial vectors. Various varieties of shRNAs have been reported in the art. See, for example: Xiang et al. 2006. Nature Biotech. 24: 697-702; Macrae et al. 2006 Science 31 1: 195-8. Lombardo et al. 2007. Nature Biotech. 25: 1298-1306; Wang et al. 201 1. Pharm. Res. 28: 2983-2995; Senzer et al. 2011 Mol. Ther. 20: 679-686. In various non-limiting examples, the RNAi agent is a miRNA (microRNA), which reportedly is a small RNA molecule (ca. 22 nt) that, like siRNAs, also silences targets via RISC. Naturally-occurring miRNAs are encoded by eukaryotic nuclear DNA; miRNAs are generated by post-transcriptional RNA processing, and function via base-pairing with complementary sequences within mRNA molecules, usually resulting in translational repression or target degradation and gene silencing. The human genome can reportedly encode over 1000 miRNAs, which may target about 60% of mammalian genes and are abundant in many human cell types. Various varieties of naturally-occurring and artificial derivatives of miRNAs have been reported in the art. See, for example: Lewis et al. 2003. Cell 1 15: 787-798; Lim et al. 2003. Genes Dev. 17: 991-1008; He et al. 2004. Nat. Rev. Genet. 5: 522-31; Bentwich et al. 2005. Nat. Genet. 37: 766-70; Lewis et al. 2005. Cell 120: 15-20; Kusenda et al. 2006. Biomed Pap Med Fac Univ Palacky Olomouc Czech Repub 150: 205-15; Zhang et al. 2006. J. Gen. Gen. 36: 1-6; Brodersen et al. 2008. Science 320: 1 185-90; Friedman et al. 2009. Genome Res. 19 (1): 92-105; Bartel 2009. Cell 136 (2): 215-33. In various non-limiting examples, the RNAi agent is a sisiRNA (small internally segmented interfering RNA), wherein the sense strand comprises at least one single-stranded nick. This nick decreases the incorporation of the sense strand into the RISC complex and thus reduces off-target effects. See: WO 2007/107162. In various non-limiting examples, a DNA-RNA chimera, wherein the seed portion of each strand is DNA, while the remainder of each strand is RNA. See: Yamato et al. 2011 Cancer Gene Ther. 18: 587-597. In various non-limiting examples, the RNAi agent is a siRNA comprising two mismatches, wherein that the molecule reportedly comprises three short double-stranded regions. In one embodiment of this RNAi agent, the guide (antisense) strand is a 22-mer, while the sense strand is a 20-mer (producing only a single 2-nt overhang on the 3′ end of the anti-sense strand; and two mismatches reportedly produce double-stranded regions of 6, 8 and 4 bp. See: U.S. Pat. App. 2009/0209626. In various embodiments, the RNAi agent is a neutral siRNA, in which the negative charges of the phosphate backbone are reversibly masked; Meade et al. 2014 Nat. Biotech. 32: 1256-1261. In various non-limiting examples, the RNAi agent is a aiRNA (assymetrical interfering RNA) which comprises a sense strand is shorter than 19-nt long, so that the anti-sense strand is reportedly preferentially loaded into RISC, and thus off-target effects are reduced. In various embodiments of this RNAi agent, the anti-sense strand is 21-nt long, but the sense strand is only 15 or 16 nt long. See: Sun et al. 2008 Nature Biotech. 26: 1379-1382; and Chu and Rana. 2008 RNA 14: 1714-1719. In various non-limiting examples, the RNAi agent is a siRNA comprising a terminal or internal spacer (e.g., an 18-mer format siRNA), which reportedly comprises a strand which is shorter than that of a canonical siRNA, wherein the strand comprises an internal or terminal spacer such as a ribitol or other type of non-nucleotidic spacer. See: WO2015/051366. In some embodiments, RNAi agents include those that target any of: miR-122, VEGF, VEGF-R1, RTP801, Caspase 2, KRT6A(N171K), ADRB2, TRPV1, Syk kinase, RSV Nucleocapsid, Beta catenin, KRASG12D, Apo B, PLK1, KSP and VEGF, TTR, Bcr-Abl, PKN3, P53, RRM2, Furin and GM-CSF, LMP2, LMP7, MECL1, HIV Tat and Rev. In some embodiments, a composition comprises a lipid and a portion of a RNAi agent capable of mediating at least one function of a RNAi agent.

[0392] Sample: A “sample” as used herein is a specific organism or material obtained therefrom. In some embodiments, a sample is a biological sample obtained or derived from a source of interest, as described herein. In some embodiments, a source of interest comprises an organism, such as an animal or human. In some embodiments, a biological sample comprises biological tissue or fluid. In some embodiments, a biological sample is or comprises bone marrow; blood; blood cells; ascites; tissue or fine needle biopsy samples; cell-containing body fluids; free floating nucleic acids; sputum; saliva; urine; cerebrospinal fluid, peritoneal fluid; pleural fluid; feces; lymph; gynecological fluids; skin swabs; vaginal swabs; oral swabs; nasal swabs; washings or lavages such as a ductal lavages or broncheoalveolar lavages; aspirates; scrapings; bone marrow specimens; tissue biopsy specimens; surgical specimens; feces, other body fluids, secretions, and/or excretions; and/or cells therefrom, etc. In some embodiments, a biological sample is or comprises cells obtained from an individual. In some embodiments, a sample is a “primary sample” obtained directly from a source of interest by any appropriate means. For example, in some embodiments, a primary biological sample is obtained by methods selected from the group consisting of biopsy (e.g., fine needle aspiration or tissue biopsy), surgery, collection of body fluid (e.g., blood, lymph, feces etc.), etc. In some embodiments, as will be clear from context, the term “sample” refers to a preparation that is obtained by processing (e.g., by removing one or more components of and/or by adding one or more agents to) a primary sample. For example, filtering using a semi-permeable membrane. Such a “processed sample” may comprise, for example nucleic acids or proteins extracted from a sample or obtained by subjecting a primary sample to techniques such as amplification or reverse transcription of mRNA, isolation and/or purification of certain components, etc. In some embodiments, a sample is an organism. In some embodiments, a sample is a plant. In some embodiments, a sample is an animal. In some embodiments, a sample is a human. In some embodiments, a sample is an organism other than a human.

[0393] Small molecule: The terms “small molecule” or “low molecular weight molecule” or “LMW molecule” and the like, as used herein, refer to molecules which have a relatively low molecular weight. As a non-limiting example, small molecules include molecules that are less than about 7500, 7000, 6000, 5000, 4000, 3000, 2500, 2000, 1500, 1000, 900, 800, 700, 600, 500, 400, 300, 200, or 100 molecular weight. In some embodiments, a small molecule is a biologically active agent, and inhibit or decrease target gene or target gene product level, product, and/or activity. Example small molecules include, but are not limited to, small organic molecules (e.g., Cane et al. 1998. Science 282: 63), and natural product extract libraries. In another embodiment, small molecules are small, organic non-peptidic compounds. In some embodiments, small molecule inhibitors indirectly or directly inhibit or decrease target gene or target gene product level, product, and/or activity. In some embodiments, a composition comprises a lipid and a portion of a small molecule capable of mediating at least one function of a small molecule.

[0394] Small nucleolar RNAs (snoRNAs): The terms “small nucleolar RNA”, “snoRNA” and the like, as used herein, refer to any of a class of small RNA molecules that, for example, guide chemical modifications of other RNAs. In some embodiments, snoRNAs are capable of guiding chemical modifications of other RNAs, including ribosomal RNAs, transfer RNAs and small nuclear RNAs. In some embodiments, there are reportedly two main classes of snoRNA, the C/D box snoRNAs, which are associated with methylation, and the H/ACA box snoRNAs, which are associated with pseudouridylation.

[0395] Splice switching oligonucleotide (SSO): The term “Splice switching oligonucleotide” or “SSO”, as used herein, refers to an oligonucleotide capable of altering the splicing of a pre-mRNA. In a non-limiting example, a SSO can bind to a 5′ or 3′ splicing junction or to exonic splicing enhancer or silencing sites. In doing so, a SSO can modify splicing in various ways, such as promoting alternative use of exons, exon exclusion, or exon inclusion. In various embodiments, a SSO can cause an exon to be skipped; or, in other cases, prevent the skipping of an exon. Crooke 2004 Curr. Mol. Med. 4: 465-487; Bennett et al. 2010 Ann. Rev. Pharmacol. Toxicol. 50: 259-293; and Kole et al. 2012 Nat. Rev. Drug Discov. 11: 125-140. A non-limiting example of a SSO is an oligonucleotide which is reportedly capable of mediating skipping of an exon in dystrophin pre-mRNA. A non-limiting example of a SSO is WV-942. A non-limiting example of a SSO is an oligonucleotide which is capable of preventing the skipping of an exon in the SMN2 pre-mRNA; see Rigo et al. 2012 J. Cell Biol. 199: 21-25; and Kaczmarek et al. 2015 Exp. Opin. Exp. Drugs 24: 867-881. In some embodiments, a composition comprises a lipid and a portion of a snoRNA capable of mediating at least one function of a snoRNA. In some embodiments, a SSO switches splicing in a gene related to a muscle-related disorder. In some embodiments, a SSO is capable of skipping or mediating the skipping of an exon, wherein a mutation in the exon is related to a muscle-related disorder. In some embodiments, a SSO is capable of preventing the skipping or mediating the prevent of skipping of an exon, wherein a mutation in the exon is related to a muscle-related disorder. In some embodiments, a SSO is capable of skipping or mediates skipping of an exon in the dystrophin gene. In some embodiments, a SSO is capable of skipping or mediates skipping of exon 51, 45, 53 or 44 in the dystrophin gene. In some embodiments, a SSO is capable of preventing or mediating the prevention of skipping of an exon in a gene related to SMA. In some embodiments, a SSO is capable of preventing or mediating the prevention of skipping of an exon in the SMN2 gene. In some embodiments, a SSO is capable of preventing or mediating the prevention of skipping of exon 7 in the SMN2 gene.

[0396] Stereochemically isomeric forms: The phrase “stereochemically isomeric forms,” “stereoisomers,” and the like, as used herein, refers to different compounds made up of the same atoms bonded by the same sequence of bonds but having different three-dimensional structures which are not interchangeable. In some embodiments of the invention, provided chemical compositions may be or include pure preparations of individual stereochemically isomeric forms of a compound; in some embodiments, provided chemical compositions may be or include mixtures of two or more stereochemically isomeric forms of the compound. In certain embodiments, such mixtures contain equal amounts of different stereochemically isomeric forms; in certain embodiments, such mixtures contain different amounts of at least two different stereochemically isomeric forms. In some embodiments, a chemical composition may contain all diastereomers and/or enantiomers of the compound. In some embodiments, a chemical composition may contain less than all diastereomers and/or enantiomers of a compound. In some embodiments, if a particular enantiomer of a compound of the present invention is desired, it may be prepared, for example, by asymmetric synthesis, or by derivation with a chiral auxiliary, where the resulting diastereomeric mixture is separated and the auxiliary group cleaved to provide the pure desired enantiomers. Alternatively, where the molecule contains a basic functional group, such as amino, diastereomeric salts are formed with an appropriate optically-active acid, and resolved, for example, by fractional crystallization. In some embodiments, a composition which is stereorandom comprises two or more stereoisomers.

[0397] Subject and related terms: As used herein, the term “subject”, “human subject”, “test subject” and related terms, as used herein, refer to any organism to which a provided compound or composition is administered in accordance with the present invention e.g., for experimental, diagnostic, prophylactic, and/or therapeutic purposes. Typical subjects include animals (e.g., mammals such as mice, rats, rabbits, non-human primates, and humans; insects; worms; etc.) and plants. In some embodiments, a subject may be suffering from, and/or susceptible to a disease, disorder, and/or condition. In some embodiments, a subject is a human being or other mammal. In some embodiments, a subject can be male or female. In non-limiting examples, the animal is a vertebrate such as a primate, rodent, domestic animal or game animal. In non-limiting examples, primates include chimpanzees, cynomologous monkeys, spider monkeys, and macaques, e.g., Rhesus. Rodents include mice, rats, woodchucks, ferrets, rabbits and hamsters. In non-limiting examples, domestic and game animals include cows, horses, pigs, deer, bison, buffalo, feline species, e.g., domestic cat, canine species, e.g., dog, fox, wolf, avian species, e.g., chicken, emu, ostrich, and fish, e.g., trout, catfish and salmon. In certain embodiments of the aspects described herein, the subject is a mammal, e.g., a primate, e.g., a human. In non-limiting examples, the mammal can be a human, non-human primate, mouse, rat, dog, cat, horse, or cow, but are not limited to these examples. In some embodiments, a mammal other than a human can be advantageously used as subjects that represent animal models of disorders associated with autoimmune disease or inflammation. In some embodiments, a method and composition described herein can be used to treat domesticated animals and/or pets.

[0398] Substantially: As used herein, the term “substantially” refers to the qualitative condition of exhibiting total or near-total extent or degree of a characteristic or property of interest. One of ordinary skill in the biological arts will understand that biological and chemical phenomena rarely, if ever, go to completion and/or proceed to completeness or achieve or avoid an absolute result. The term “substantially” is therefore used herein to capture the potential lack of completeness inherent in many biological and/or chemical phenomena.

[0399] Suffering from: An individual who is “suffering from” a disease, disorder, and/or condition has been diagnosed with and/or displays one or more symptoms of a disease, disorder, and/or condition.

[0400] Susceptible to: An individual who is “susceptible to” a disease, disorder, and/or condition is one who has a higher risk of developing the disease, disorder, and/or condition than does a member of the general public. In some embodiments, an individual who is susceptible to a disease, disorder and/or condition may not have been diagnosed with the disease, disorder, and/or condition. In some embodiments, an individual who is susceptible to a disease, disorder, and/or condition may exhibit symptoms of the disease, disorder, and/or condition. In some embodiments, an individual who is susceptible to a disease, disorder, and/or condition may not exhibit symptoms of the disease, disorder, and/or condition. In some embodiments, an individual who is susceptible to a disease, disorder, and/or condition will develop the disease, disorder, and/or condition. In some embodiments, an individual who is susceptible to a disease, disorder, and/or condition will not develop the disease, disorder, and/or condition.

[0401] Systemic: The phrases “systemic administration,” “administered systemically,” “peripheral administration,” and “administered peripherally” as used herein have their art-understood meaning referring to administration of a compound or composition such that it enters the recipient's system.

[0402] Targeting compound or moiety or component: The term “targeting moiety”, “targeting compound or moiety”, “targeting compound”, “target component”, and the like, as used herein, is a structure capable of targeting a compound or composition to a particular cell or tissue or subset of cells or tissues. In some embodiments, a targeting moiety is designed to take advantage of cell- or tissue-specific expression of particular targets, receptors, proteins, or other subcellular components; In some embodiments, a targeting moiety is a ligand (e.g., a small molecule, antibody, peptide, protein, carbohydrate, aptamer, etc.) that targets a compound or a composition to a cell or tissue, and/or binds to a target, receptor, protein, or other subcellular component. In some embodiments, a targeting moiety targets a composition comprising a lipid and a biologically active agent to a muscle cell or tissue. In some embodiments, a targeting moiety comprises a compound that targets a muscle cell or tissue. In some embodiments, a targeting moiety comprises fetuin, epidermal growth factor, fibroblast growth factor, insulin, and/or dexamethasone, or a component or fragment or combination thereof. In some embodiments, a targeting moiety targets a composition comprising a lipid and a biologically active agent to a neuron or other cell or tissue in the neuromuscular system. In some embodiments, a targeting moiety comprises a rabies virus peptide (see Kumar et al. 2007 Nature 448: 39-43; and Hwang do et al. 2011 Biomaterials 32: 4968-4975). In some embodiments, a targeting moiety is a moiety capable of binding to a neurotransmitter transporter, a dopamine transporter, a serotonin transporter, or norepinephrine transporter, or alpha-synuclein, or a mRNA encoding any of these components (see U.S. Pat. No. 9,084,825). In some embodiments, a targeting moiety is a transferrin receptor ligand or alpha-transferrin antibody, thus reportedly making use of a transferrin receptor-mediated route across the vascular endothelium. Clark et al. 2015 Proc. Natl. Acad. Sci. USA 112: 12486-12491; Bien-Ly et al. 2014 J. Exp. Med. 211: 233-244; and Youn et al. 2014 Mol. Pharm. 11: 486-495. In some embodiments, a targeting moiety binds to an integrin. In some embodiments, a targeting moiety binds to alphallbeta3, e.g., on platelets. In some embodiments, a targeting moiety binds to a beta2 integrin, e.g., on a leukocyte. In some embodiments, a targeting moiety binds to an alphavbeta3, e.g., on a tumor cell. In some embodiments, a targeting moiety binds to a GPCR (G protein-coupled receptor) (see Hanyaloglu et al. 2008 Ann. Rev. Pharm. Tox. 48: 537-568). In some embodiments, a targeting moiety binds to a gastrin releasing peptide receptor, e.g., on a cancer cell (see Cornelio et al. 2007 Ann. Oncol. 18: 1457-1466). In some embodiments, a targeting moiety comprises a carbonic anhydrase inhibitor.

[0403] Tautomeric forms: The phrase “tautomeric forms,” as used herein, is used to describe different isomeric forms of organic compounds that are capable of facile interconversion. Tautomers may be characterized by the formal migration of a hydrogen atom or proton, accompanied by a switch of a single bond and adjacent double bond. In some embodiments, tautomers may result from prototropic tautomerism (i.e., the relocation of a proton). In some embodiments, tautomers may result from valence tautomerism (i.e., the rapid reorganization of bonding electrons). All such tautomeric forms are intended to be included within the scope of the present invention. In some embodiments, tautomeric forms of a compound exist in mobile equilibrium with each other, so that attempts to prepare the separate substances results in the formation of a mixture. In some embodiments, tautomeric forms of a compound are separable and isolatable compounds. In some embodiments of the invention, chemical compositions may be provided that are or include pure preparations of a single tautomeric form of a compound. In some embodiments of the invention, chemical compositions may be provided as mixtures of two or more tautomeric forms of a compound. In certain embodiments, such mixtures contain equal amounts of different tautomeric forms; in certain embodiments, such mixtures contain different amounts of at least two different tautomeric forms of a compound. In some embodiments of the invention, chemical compositions may contain all tautomeric forms of a compound. In some embodiments of the invention, chemical compositions may contain less than all tautomeric forms of a compound. In some embodiments of the invention, chemical compositions may contain one or more tautomeric forms of a compound in amounts that vary over time as a result of interconversion. In some embodiments of the invention, the tautomerism is keto-enol tautomerism. One of skill in the chemical arts would recognize that a keto-enol tautomer can be “trapped” (i.e., chemically modified such that it remains in the “enol” form) using any suitable reagent known in the chemical arts to provide an enol derivative that may subsequently be isolated using one or more suitable techniques known in the art. Unless otherwise indicated, the present invention encompasses all tautomeric forms of relevant compounds, whether in pure form or in admixture with one another.

[0404] Therapeutic agent: As used herein, the phrase “therapeutic agent” refers to any agent that, when administered to a subject, has a therapeutic effect and/or elicits a desired biological and/or pharmacological effect. In some embodiments, a therapeutic agent is any substance that can be used to alleviate, ameliorate, relieve, inhibit, prevent, delay onset of, reduce severity of, and/or reduce incidence of one or more symptoms or features of a disease, disorder, and/or condition.

[0405] Therapeutically effective amount: As used herein, the term “therapeutically effective amount” means an amount of a substance (e.g., a therapeutic agent, composition, and/or formulation) that elicits a desired biological response when administered as part of a therapeutic regimen. In some embodiments, a therapeutically effective amount of a substance is an amount that is sufficient, when administered to a subject suffering from or susceptible to a disease, disorder, and/or condition, to treat, diagnose, prevent, and/or delay the onset of the disease, disorder, and/or condition. As will be appreciated by those of ordinary skill in this art, the effective amount of a substance may vary depending on such factors as the desired biological endpoint, the substance to be delivered, the target cell or tissue, etc. For example, the effective amount of compound in a formulation to treat a disease, disorder, and/or condition is the amount that alleviates, ameliorates, relieves, inhibits, prevents, delays onset of, reduces severity of and/or reduces incidence of one or more symptoms or features of the disease, disorder, and/or condition. In some embodiments, a therapeutically effective amount is administered in a single dose; in some embodiments, multiple unit doses are required to deliver a therapeutically effective amount.

[0406] Treat: As used herein, the term “treat,” “treatment,” or “treating” refers to any method used to partially or completely alleviate, ameliorate, relieve, inhibit, prevent, delay onset of, reduce severity of, and/or reduce incidence of one or more symptoms or features of a disease, disorder, and/or condition. Treatment may be administered to a subject who does not exhibit signs of a disease, disorder, and/or condition. In some embodiments, treatment may be administered to a subject who exhibits only early signs of the disease, disorder, and/or condition, for example for the purpose of decreasing the risk of developing pathology associated with the disease, disorder, and/or condition.

[0407] Unsaturated: The term “unsaturated” as used herein, means that a moiety has one or more units of unsaturation.

[0408] Unit dose: The expression “unit dose” as used herein refers to an amount administered as a single dose and/or in a physically discrete unit of a pharmaceutical composition. In many embodiments, a unit dose contains a predetermined quantity of an active agent. In some embodiments, a unit dose contains an entire single dose of the agent. In some embodiments, more than one unit dose is administered to achieve a total single dose. In some embodiments, administration of multiple unit doses is required, or expected to be required, in order to achieve an intended effect. A unit dose may be, for example, a volume of liquid (e.g., an acceptable carrier) containing a predetermined quantity of one or more therapeutic agents, a predetermined amount of one or more therapeutic agents in solid form, a sustained release formulation or drug delivery device containing a predetermined amount of one or more therapeutic agents, etc. It will be appreciated that a unit dose may be present in a formulation that includes any of a variety of components in addition to the therapeutic agent(s). For example, acceptable carriers (e.g., pharmaceutically acceptable carriers), diluents, stabilizers, buffers, preservatives, etc., may be included as described infra. It will be appreciated by those skilled in the art, in many embodiments, a total appropriate daily dosage of a particular therapeutic agent may comprise a portion, or a plurality, of unit doses, and may be decided, for example, by the attending physician within the scope of sound medical judgment. In some embodiments, the specific effective dose level for any particular subject or organism may depend upon a variety of factors including the disorder being treated and the severity of the disorder; activity of specific active compound employed; specific composition employed; age, body weight, general health, sex and diet of the subject; time of administration, and rate of excretion of the specific active compound employed; duration of the treatment; drugs and/or additional therapies used in combination or coincidental with specific compound(s) employed, and like factors well known in the medical arts.

[0409] Vaccine: The term “vaccine”, as used herein, refers to a molecule that improves immunity to a particular disease or infectious agent. Vaccines encoded in the polynucleotides, primary constructs or mmRNA of the invention may be utilized to treat conditions or diseases in many therapeutic areas such as, but not limited to, cardiovascular, CNS, dermatology, endocrinology, oncology, immunology, respiratory, and anti-infective. In some embodiments, a vaccine comprises an agent that immunologically resembles a disease-causing micro-organism or fragment thereof; In some embodiments, a vaccine is made from weakened or killed forms of the virus, microbe, parasite or other pathogen, or a fragment thereof. In some embodiments, a vaccine stimulates the body's immune system to recognize the agent as a threat, destroy it, and keep a record of it, so that the immune system can more easily recognize and destroy any of these micro-organisms that it later encounters. In some embodiments, a vaccine is prophylactic or therapeutic. In various embodiments, a vaccine can be to a virus, a bacterium, a parasite, or another pathogen. In some embodiments, a vaccine is to a virus selected from: common cold virus, Hepatitis A virus, Hepatitis B virus, Hepatitis E virus, Human papillomavirus, Influenza virus, Japanese encephalitis virus, Measles virus, Mumps virus, Polio virus, Rabies virus, Rhinovirus, Rotavirus, Rubella virus, Varicella zoster virus, Variola virus, and Yellow fever virus. In various embodiments, a vaccine is a vaccine selected from: a virus vaccine, Adenovirus vaccine, Coxsackie B virus vaccine, Cytomegalovirus vaccine, Dengue vaccine for humans, Eastern Equine encephalitis virus vaccine for humans, Ebola vaccine, Enterovirus 71 vaccine, Epstein-Barr vaccine, Hepatitis C vaccine, HIV vaccine, HTLV-1 T-lymphotropic leukemia vaccine for humans, Marburg virus disease vaccine, Norovirus vaccine, Respiratory syncytial virus vaccine for humans, Severe acute respiratory syndrome (SARS) vaccine, West Nile virus vaccine for humans, and Zika virus vaccine. In some embodiments, a vaccine is to a bacterium selected from: Bacillus anthracis, Vibrio cholerae, Bordetella pertussis, Clostridium tetani, Corynebacterium diphtheriae, Haemophilus influenzae type B (Hib), Neisseria meningitidis, Streptococcus pneumoniae, Coxiella burnetii, Mycobacterium tuberculosis, and Salmonella typhi. In various embodiments, a vaccine is a vaccine selected from: a Bacterial disease vaccine, Caries vaccine, Ehrlichiosis vaccine, Leprosy vaccine, Lyme disease vaccine, Staphylococcus aureus vaccine, Streptococcus pyogenes vaccine, Syphilis vaccine, Tularemia vaccine, and Yersinia pestis vaccine. In various embodiments, a vaccine is a vaccine selected from: A parasitic disease vaccine, Malaria vaccine, Schistosomiasis vaccine, Chagas disease vaccine, Hookworm vaccine, Onchocerciasis river blindness vaccine for humans, Trypanosomiasis vaccine, and Visceral leishmaniasis vaccine. In various embodiments, a vaccine is selected from: a non-infectious disease vaccine, Alzheimer's disease amyloid protein vaccine, Breast cancer vaccine, Ovarian cancer vaccine, Prostate cancer vaccine, and Talimogene laherparepvec (T-VEC). In some embodiments, a composition comprises a lipid and a portion of a vaccine capable of mediating at least one function of a vaccine.

[0410] Wild-type: As used herein, the term “wild-type” has its art-understood meaning that refers to an entity having a structure and/or activity as found in nature in a “normal” (as contrasted with mutant, diseased, altered, etc) state or context. Those of ordinary skill in the art will appreciate that wild type genes and polypeptides often exist in multiple different forms (e.g., alleles).

[0411] Nucleic acid: The term “nucleic acid”, as used herein, includes any nucleotides, analogs, and polymers thereof. The term “polynucleotide” as used herein refers to a polymeric form of nucleotides of any length, either ribonucleotides (RNA) or deoxyribonucleotides (DNA). These terms refer to the primary structure of the molecules and, thus, include double- and single-stranded DNA, and double- and single-stranded RNA. These terms include, as equivalents, analogs of either RNA or DNA made from nucleotide analogs and modified polynucleotides such as, though not limited to, methylated, protected and/or capped nucleotides or polynucleotides. The terms encompass poly- or oligo-ribonucleotides (RNA) and poly- or oligo-deoxyribonucleotides (DNA); RNA or DNA derived from N-glycosides or C-glycosides of nucleobases and/or modified nucleobases; nucleic acids derived from sugars and/or modified sugars; and nucleic acids derived from phosphate bridges and/or modified phosphorus-atom bridges or internucleotidic linkage. The term encompasses nucleic acids containing any combinations of nucleobases, modified nucleobases, sugars, modified sugars, phosphate bridges or modified phosphorus atom bridges. Examples include, and are not limited to, nucleic acids containing ribose moieties, the nucleic acids containing deoxy-ribose moieties, nucleic acids containing both ribose and deoxyribose moieties, nucleic acids containing ribose and modified ribose moieties. The prefix poly- refers to a nucleic acid containing 2 to about 10,000 nucleotide monomer units and wherein the prefix oligo- refers to a nucleic acid containing 2 to about 200 nucleotide monomer units. In some embodiments, a nucleic acid includes, but not limited to, deoxyribonucleotides or ribonucleotides and polymers thereof, for example, in at least partially single- or double-stranded form. In some embodiments, a nucleic acid includes any nucleotides, modified nucleotides, and/or nucleotide analogs, and polymers thereof. In some embodiments, a polynucleotide includes a polymeric form of nucleotides of any length, either ribonucleotides (RNA) or deoxyribonucleotides (DNA). These terms refer to the primary structure of the molecules and, thus, include double- and single-stranded DNA, and double- and single-stranded RNA. These terms include, as equivalents, analogs of either RNA or DNA made from nucleotide analogs and modified polynucleotides such as, though not limited to, methylated, protected and/or capped nucleotides or polynucleotides. Analogs of RNA and DNA (e.g., nucleotide analogs) include, but are not limited to: Morpholino, PNA, LNA, BNA, TNA, GNA, ANA, FANA, CeNa, HNA and UNA. Modified nucleotides include those which are modified in the phosphate, sugar, and/or base. Such modifications include sugar modifications at the 2′ carbon, such as 2′-MOE, 2′-OMe, and 2′-F. In some embodiments, a nucleic acid includes a poly- or oligo-ribonucleotide (RNA) and poly- or oligo-deoxyribonucleotide (DNA); RNA or DNA derived from N-glycosides or C-glycosides of nucleobases and/or modified nucleobases; nucleic acids derived from sugars and/or modified sugars; and nucleic acids derived from phosphate bridges and/or modified phosphorus-atom bridges or internucleotidic linkage. The term encompasses nucleic acids containing any combinations of nucleobases, modified nucleobases, sugars, modified sugars, phosphate bridges or modified phosphorus atom bridges. Examples include, and are not limited to, nucleic acids containing ribose moieties, the nucleic acids containing deoxy-ribose moieties, nucleic acids containing both ribose and deoxyribose moieties, nucleic acids containing ribose and modified ribose moieties. In some embodiments, a nucleic acid is an oligonucleotide, an antisense oligonucleotide, an RNAi agent, a miRNA, splice switching oligonucleotide (SSO), immunomodulatory nucleic acid, an aptamer, a ribozyme, a Piwi-interacting RNA (piRNA), a small nucleolar RNA (snoRNA), a mRNA, a lncRNA, a ncRNA, an antigomir (e.g., an antagonist to a miRNA, lncRNA, ncRNA or other nucleic acid), a plasmid, a vector, or a portion thereof. In some embodiments, a nucleic acid is a chirally controlled nucleic acid composition. In some embodiments, the biologically active agent is a chirally controlled oligonucleotide composition, or a chirally controlled nucleic acid composition. In some embodiments, a base, nucleobase, nitrogenous base, heterocyclic base and the like includes a part (or a modified variant thereof) of a nucleic acid that is involved in the hydrogen-bonding that binds one nucleic acid strand to another complementary strand in a sequence-specific manner. The naturally occurring bases, [guanine, (G), adenine, (A), cytosine, (C), thymine, (T), and uracil (U)] are derivatives of purine (Pu) or pyrimidine (Py), though it should be understood that naturally and non-naturally occurring base analogs are also included. In some embodiments, the nucleobases are modified adenine, guanine, uracil, cytosine, or thymine. In some embodiments, the modified nucleobase mimics the spatial arrangement, electronic properties, or some other physicochemical property of the nucleobase and retains the property of hydrogen-bonding that binds one nucleic acid strand to another in a sequence specific manner. In some embodiments, a modified nucleobase can pair with all of the five naturally occurring bases (uracil, thymine, adenine, cytosine, or guanine) without substantially affecting the melting behavior, recognition by intracellular enzymes or activity of the oligonucleotide duplex. Various additional modifications of the base are known in the art. In some cases, a nucleic acid sequence may be defined as a sequence of bases, generally presented in the 5′ to 3′ direction. While in the context of a nucleic acid, a base is normally conjugated to a sugar which forms the backbone along with an internucleotidic linkage (e.g., a phosphate or phosphorothioate); however, as used herein, the term “base” does not comprise a sugar or an internucleotidic linkage. In some embodiments, a nucleoside includes a unit consisting of: (a) a base covalently bound to (b) a sugar. The base and/or sugar can be modified or not modified. In some embodiments, a sugar, as referenced herein in the context of referencing a nucleic acid, includes to a monosaccharide in closed and/or open form. The naturally occurring sugar is the pentose (five-carbon sugar) deoxyribose (which forms DNA) or ribose (which forms RNA), though it should be understood that naturally and non-naturally occurring sugar analogs are also included. Sugars include, but are not limited to, ribose, deoxyribose, pentofuranose, pentopyranose, and hexopyranose moieties. As used herein, the term also encompasses structural analogs used in lieu of conventional sugar molecules, such as glycol, polymer of which forms the backbone of the nucleic acid analog, glycol nucleic acid (“GNA”). A deoxynucleoside comprises a deoxyribose. In some cases, a nucleic acid sequence may be defined as a sequence of bases and sugar modifications. In some embodiments, a sugar includes includes a modified sugar or unmodified sugar. In some embodiments, a modified sugar includes, as referenced in the context of a nucleic acid, a sugar which has been modified or a moiety that can functionally replace a sugar in a nucleic acid or modified nucleic acid. The modified sugar mimics the spatial arrangement, electronic properties, or some other physicochemical property of a sugar. A modified sugar, as a non-limiting example, can have a modification at the 2′ carbon. Various modifications include 2′-MOE, 2′-OMe and 2′-F. Various additional modifications of the sugar are known in the art. In some embodiments, a nucleotide includes to a monomeric unit of a polynucleotide that consists of: (a) a heterocyclic base, a sugar, and one or more phosphate groups or phosphorus-containing internucleotidic linkages; a nucleotide is a subunit of a polynucleotide, nucleic acid or oligonucleotide. Each base, sugar and phosphate or internucleoside linker can be independently modified or not modified. Many internucleotidic linkages are known in the art (such as, though not limited to, phosphate, phosphorothioates, boranophosphates and the like). Artificial nucleic acids include PNAs (peptide nucleic acids), phosphotriesters, phosphorothionates, H-phosphonates, phosphoramidates, boranophosphates, methylphosphonates, phosphonoacetates, thiophosphonoacetates and other variants of the phosphate backbone of native nucleic acids, such as those described herein. In some embodiments, an internucleotidic linkage includes linkage between nucleoside units of an oligonucleotide; in most cases the linkage comprises a phosphorus or linkage phosphorus; in some embodiments, the linkage is referred to as “p”. In some embodiments, an internucleotidic linkage is a phosphodiester linkage, as found in naturally occurring DNA and RNA molecules. In some embodiments, the linkage is a phosphorothioate. In some embodiments, the backbone of an oligonucleotide or a nucleic acid includes the alternating sugars and internucleotidic linkages (e.g., a phosphodiester or phosphorothioate). Unless specifically limited, the term encompasses nucleic acids containing known analogues of natural nucleotides which have similar binding properties as the reference nucleic acid and are metabolized in a manner similar to naturally occurring nucleotides. Unless otherwise indicated, a particular nucleic acid sequence also implicitly encompasses conservatively modified variants thereof (e.g., degenerate codon substitutions) and complementary sequences and as well as the sequence explicitly indicated. Specifically, degenerate codon substitutions may be achieved by generating sequences in which the third position of one or more selected (or all) codons is substituted with mixed-base and/or deoxyinosine residues (Batzer et al., Nucleic Acid Res. 19:5081 (1991); Ohtsuka et al., J. Biol. Chem. 260:2605-2608 (1985); and Rossolini et al., Mol. Cell. Probes 8:91-98 (1994)). Also included are molecules having naturally occurring phosphodiester linkages as well as those having non-naturally occurring linkages, e.g., for stabilization purposes. The nucleic acid may be in any physical form, e.g., linear, circular, or supercoiled. The term nucleic acid is used interchangeably with oligonucleotide, gene, cDNA, and mRNA encoded by a gene. In various embodiments, one or more nucleotides is modified or is substituted with one or more DNA, a peptide nucleic acid (PNA), locked nucleic acid (LNA), morpholino nucleotide, threose nucleic acid (TNA), glycol nucleic acid (GNA), arabinose nucleic acid (ANA), 2′-fluoroarabinose nucleic acid (FANA), cyclohexene nucleic acid (CeNA), anhydrohexitol nucleic acid (HNA), constrained ethyl (cEt), tricyclo-DNA (tc-DNA), xeno nucleic acid (XNA), and/or unlocked nucleic acid (UNA). In various embodiments, the nucleic acid comprises a modified internucleoside linker.

[0412] Nucleotide: The term “nucleotide” as used herein refers to a monomeric unit of a polynucleotide that consists of a heterocyclic base, a sugar, and one or more phosphate groups or phosphorus-containing internucleotidic linkages. The naturally occurring bases, (guanine, (G), adenine, (A), cytosine, (C), thymine, (T), and uracil (U)) are derivatives of purine or pyrimidine, though it should be understood that naturally and non-naturally occurring base analogs are also included. The naturally occurring sugar is the pentose (five-carbon sugar) deoxyribose (which forms DNA) or ribose (which forms RNA), though it should be understood that naturally and non-naturally occurring sugar analogs are also included. Nucleotides are linked via internucleotidic linkages to form nucleic acids, or polynucleotides. Many internucleotidic linkages are known in the art (such as, though not limited to, phosphate, phosphorothioates, boranophosphates and the like). Artificial nucleic acids include PNAs (peptide nucleic acids), phosphotriesters, phosphorothionates, H-phosphonates, phosphoramidates, boranophosphates, methylphosphonates, phosphonoacetates, thiophosphonoacetates and other variants of the phosphate backbone of native nucleic acids, such as those described herein. As described herein, in some embodiments, a nucleotide is a natural nucleotide; in some embodiments, a nucleotide is modified.

[0413] Nucleoside: The term “nucleoside”, as used herein, refers to a moiety wherein a nucleobase or a modified nucleobase is covalently bound to a sugar or modified sugar.

[0414] Sugar. The term “sugar”, as used herein, refers to a saccharide, in some embodiments, a monosaccharide in closed and/or open form. Sugars include, but are not limited to, ribose, deoxyribose, pentofuranose, pentopyranose, and hexopyranose moieties. As used herein, the term also encompasses structural analogs used in lieu of conventional sugar molecules, such as glycol, polymer of which forms the backbone of the nucleic acid analog, glycol nucleic acid (“GNA”).

[0415] Modified sugar: The term “modified sugar”, as used herein, refers to a moiety that can replace a sugar, in some embodiments, in oligonucleotides. The modified sugar mimics the spatial arrangement, electronic properties, or some other physicochemical property of a sugar.

[0416] Nucleobase: The term “nucleobase”, as used herein, refers to the parts of nucleic acids that are involved in the hydrogen-bonding that binds one nucleic acid strand to another complementary strand in a sequence specific manner. The most common naturally-occurring nucleobases are adenine (A), guanine (G), uracil (U), cytosine (C), and thymine (T). In some embodiments, the naturally-occurring nucleobases are modified adenine, guanine, uracil, cytosine, or thymine. In some embodiments, the naturally-occurring nucleobases are methylated adenine, guanine, uracil, cytosine, or thymine. In some embodiments, a nucleobase is a “modified nucleobase,” e.g., a nucleobase other than adenine (A), guanine (G), uracil (U), cytosine (C), and thymine (T). In some embodiments, the modified nucleobases are methylated adenine, guanine, uracil, cytosine, or thymine. In some embodiments, the modified nucleobase mimics the spatial arrangement, electronic properties, or some other physicochemical property of the nucleobase and retains the property of hydrogen-bonding that binds one nucleic acid strand to another in a sequence specific manner. In some embodiments, a modified nucleobase can pair with all of the five naturally occurring bases (uracil, thymine, adenine, cytosine, or guanine) without substantially affecting the melting behavior, recognition by intracellular enzymes or activity of the oligonucleotide duplex.

[0417] Chiral ligand: The term “chiral ligand” or “chiral auxiliary”, as used herein, refers to a moiety that is chiral and can be incorporated into a reaction so that the reaction can be carried out with certain stereoselectivity.

[0418] Condensing reagent: In a condensation reaction, the term “condensing reagent”, as used herein, refers to a reagent that activates a less reactive site and renders it more susceptible to attack by another reagent. In some embodiments, such another reagent is a nucleophile.

[0419] Blocking group: The term “blocking group”, as used herein, refers to a group that masks the reactivity of a functional group. The functional group can be subsequently unmasked by removal of the blocking group. In some embodiments, a blocking group is a protecting group.

[0420] Moiety: The term “moiety”, as used herein, refers to a specific segment or functional group of a molecule. Chemical moieties are often recognized chemical entities embedded in or appended to a molecule.

[0421] Solid support: The term “solid support”, as used herein, refers to any support which enables synthesis of nucleic acids. In some embodiments, the term refers to a glass or a polymer, that is insoluble in the media employed in the reaction steps performed to synthesize nucleic acids, and is derivatized to comprise reactive groups. In some embodiments, the solid support is Highly Cross-linked Polystyrene (HCP) or Controlled Pore Glass (CPG). In some embodiments, the solid support is Controlled Pore Glass (CPG). In some embodiments, the solid support is hybrid support of Controlled Pore Glass (CPG) and Highly Cross-linked Polystyrene (HCP).

[0422] Coding sequence: A DNA “coding sequence” or “coding region” is a double-stranded DNA sequence which is transcribed and translated into a polypeptide in vivo when placed under the control of appropriate expression control sequences. The boundaries of the coding sequence (the “open reading frame” or “ORF”) are determined by a start codon at the 5′ (amino) terminus and a translation stop codon at the 3′ (carboxyl) terminus. A coding sequence can include, but is not limited to, prokaryotic sequences, cDNA from eukaryotic mRNA, genomic DNA sequences from eukaryotic (e.g., mammalian) DNA, and synthetic DNA sequences. A polyadenylation signal and transcription termination sequence is, usually, be located 3′ to the coding sequence. The term “non-coding sequence” or “non-coding region” refers to regions of a polynucleotide sequence that are not translated into amino acids (e.g. 5′ and 3′ un-translated regions).

[0423] Reading frame: The term “reading frame”, as used herein, refers to one of the six possible reading frames, three in each direction, of the double stranded DNA molecule. The reading frame that is used determines which codons are used to encode amino acids within the coding sequence of a DNA molecule.

[0424] Homology: The terms “Homology” or “identity” or “similarity”, as used herein, refers to sequence similarity between two nucleic acid molecules. Homology and identity can each be determined by comparing a position in each sequence which can be aligned for purposes of comparison. When an equivalent position in the compared sequences is occupied by the same base, then the molecules are identical at that position; when the equivalent site occupied by the same or a similar nucleic acid residue (e.g., similar in steric and/or electronic nature), then the molecules can be referred to as homologous (similar) at that position. Expression as a percentage of homology/similarity or identity refers to a function of the number of identical or similar nucleic acids at positions shared by the compared sequences. A sequence which is “unrelated” or “non-homologous” shares less than 40% identity, less than 35% identity, less than 30% identity, or less than 25% identity with a sequence described herein. In comparing two sequences, the absence of residues (amino acids or nucleic acids) or presence of extra residues also decreases the identity and homology/similarity. In some embodiments, the term “homology” describes a mathematically based comparison of sequence similarities which is used to identify genes with similar functions or motifs. The nucleic acid sequences described herein can be used as a “query sequence” to perform a search against public databases, for example, to identify other family members, related sequences or homologs. In some embodiments, such searches can be performed using the NBLAST and XBLAST programs (version 2.0) of Altschul, et al. (1990) J. Mol. Biol. 215:403-10. In some embodiments, BLAST nucleotide searches can be performed with the NBLAST program, score=100, wordlength=12 to obtain nucleotide sequences homologous to nucleic acid molecules of the invention. In some embodiments, to obtain gapped alignments for comparison purposes, Gapped BLAST can be utilized as described in Altschul et al., (1997) Nucleic Acids Res. 25(17):3389-3402. When utilizing BLAST and Gapped BLAST programs, the default parameters of the respective programs (e.g., XBLAST and BLAST) can be used (See www.ncbi.nlm.nih.gov).

[0425] Identity: As used herein, “identity” means the percentage of identical nucleotide residues at corresponding positions in two or more sequences when the sequences are aligned to maximize sequence matching, i.e., taking into account gaps and insertions. Identity can be readily calculated by known methods, including but not limited to those described in (Computational Molecular Biology, Lesk, A. M., ed., Oxford University Press, New York, 1988; Biocomputing: Informatics and Genome Projects, Smith, D. W., ed., Academic Press, New York, 1993; Computer Analysis of Sequence Data, Part I, Griffin, A. M., and Griffin, H. G., eds., Humana Press, New Jersey, 1994; Sequence Analysis in Molecular Biology, von Heinje, G., Academic Press, 1987; and Sequence Analysis Primer, Gribskov, M. and Devereux, J., eds., M Stockton Press, New York, 1991; and Carillo, H., and Lipman, D., SIAM J. Applied Math., 48: 1073 (1988). Methods to determine identity are designed to give the largest match between the sequences tested. Moreover, methods to determine identity are codified in publicly available computer programs. Computer program methods to determine identity between two sequences include, but are not limited to, the GCG program package (Devereux, J., et al., Nucleic Acids Research 12(1): 387 (1984)), BLASTP, BLASTN, and FASTA (Altschul, S. F. et al., J. Molec. Biol. 215: 403-410 (1990) and Altschul et al. Nuc. Acids Res. 25: 3389-3402 (1997)). The BLAST X program is publicly available from NCBI and other sources (BLAST Manual, Altschul, S., et al., NCBI NLM NIH Bethesda, Md. 20894; Altschul, S., et al., J. Mol. Biol. 215: 403-410 (1990). The well-known Smith Waterman algorithm can also be used to determine identity.

[0426] Heterologous: A “heterologous” region of a DNA sequence is an identifiable segment of DNA within a larger DNA sequence that is not found in association with the larger sequence in nature. Thus, when the heterologous region encodes a mammalian gene, the gene can usually be flanked by DNA that does not flank the mammalian genomic DNA in the genome of the source organism. Another example of a heterologous coding sequence is a sequence where the coding sequence itself is not found in nature (e.g., a cDNA where the genomic coding sequence contains introns or synthetic sequences having codons or motifs different than the unmodified gene). Allelic variations or naturally-occurring mutational events do not give rise to a heterologous region of DNA as defined herein.

[0427] Oligonucleotide: The term “oligonucleotide”, as used herein, refers to a polymer or oligomer of nucleotide monomers, containing any combination of nucleobases, modified nucleobases, sugars, modified sugars, phosphate bridges, or modified phosphorus atom bridges (also referred to herein as “internucleotidic linkage”, defined further herein).

[0428] Oligonucleotides can be single-stranded or double-stranded. As used herein, the term “oligonucleotide strand” encompasses a single-stranded oligonucleotide. A single-stranded oligonucleotide can have double-stranded regions and a double-stranded oligonucleotide can have single-stranded regions. Example oligonucleotides include, but are not limited to structural genes, genes including control and termination regions, self-replicating systems such as viral or plasmid DNA, single-stranded and double-stranded siRNAs and other RNA interference reagents (RNAi agents or iRNA agents), shRNA, antisense oligonucleotides, ribozymes, microRNAs, microRNA mimics, supermirs, aptamers, antimirs, antagomirs, Ul adaptors, triplex-forming oligonucleotides, G-quadruplex oligonucleotides, RNA activators, immuno-stimulatory oligonucleotides, and decoy oligonucleotides.

[0429] Double-stranded and single-stranded oligonucleotides that are effective in inducing RNA interference are also referred to as siRNA, RNAi agent, or iRNA agent, herein. In some embodiments, these RNA interference inducing oligonucleotides associate with a cytoplasmic multi-protein complex known as RNAi-induced silencing complex (RISC). In many embodiments, single-stranded and double-stranded RNAi agents are sufficiently long that they can be cleaved by an endogenous molecule, e.g., by Dicer, to produce smaller oligonucleotides that can enter the RISC machinery and participate in RISC mediated cleavage of a target sequence, e.g. a target mRNA.

[0430] Oligonucleotides of the present invention can be of various lengths. In particular embodiments, oligonucleotides can range from about 2 to about 200 nucleotides in length. In various related embodiments, oligonucleotides, single-stranded, double-stranded, and triple-stranded, can range in length from about 4 to about 10 nucleotides, from about 10 to about 50 nucleotides, from about 20 to about 50 nucleotides, from about 15 to about 30 nucleotides, from about 20 to about 30 nucleotides in length. In some embodiments, the oligonucleotide is from about 9 to about 39 nucleotides in length. In some embodiments, the oligonucleotide is at least 4 nucleotides in length. In some embodiments, the oligonucleotide is at least 5 nucleotides in length. In some embodiments, the oligonucleotide is at least 6 nucleotides in length. In some embodiments, the oligonucleotide is at least 7 nucleotides in length. In some embodiments, the oligonucleotide is at least 8 nucleotides in length. In some embodiments, the oligonucleotide is at least 9 nucleotides in length. In some embodiments, the oligonucleotide is at least 10 nucleotides in length. In some embodiments, the oligonucleotide is at least 11 nucleotides in length. In some embodiments, the oligonucleotide is at least 12 nucleotides in length. In some embodiments, the oligonucleotide is at least 15 nucleotides in length. In some embodiments, the oligonucleotide is at least 20 nucleotides in length. In some embodiments, the oligonucleotide is at least 25 nucleotides in length. In some embodiments, the oligonucleotide is at least 30 nucleotides in length. In some embodiments, the oligonucleotide is a duplex of complementary strands of at least 18 nucleotides in length. In some embodiments, the oligonucleotide is a duplex of complementary strands of at least 21 nucleotides in length. In some embodiments, a sequence of a nucleic acid or an oligonucleotide comprises or consists of a common base sequence hybridizes with a transcript of dystrophin, myostatin, Huntingtin, a myostatin receptor, ActRIIB, ActRIIA, DMPK, Malat1, SMN2, dystrophia myotonica protein kinase (DMPK), Proprotein convertase subtilisin/kexin type 9 (PCSK9), SMAD7 or KRT14 (Keratin 14). In some embodiments, a sequence of a nucleic acid or an oligonucleotide comprises or consists of a common base sequence hybridizes with a transcript of a gene related to Huntington's disease, spinal muscular atrophy, spinal muscular atrophy type 1, amyotrophic lateral sclerosis, Duchenne muscular dystrophy, myotonic dystrophy, myotonic dystrophy type 1, a genetic disease of the liver, a metabolic disease of the liver, epidermolysis bullosa simplex, a genetic disease of the skin, a genetic disease of the skin, or irritable bowel syndrome, or a genetic disease, or a metabolic disease.

[0431] Internucleotidic linkage: As used herein, the phrase “internucleotidic linkage” refers generally to the phosphorus-containing linkage between nucleotide units of an oligonucleotide, and is interchangeable with “inter-sugar linkage” and “phosphorus atom bridge,” as used above and herein. In some embodiments, an internucleotidic linkage is a phosphodiester linkage, as found in naturally occurring DNA and RNA molecules. In some embodiments, an internucleotidic linkage is a modified phosphodiester linkage. In some embodiments, an internucleotidic linkage is a “modified internucleotidic linkage” wherein each oxygen atom of the phosphodiester linkage is optionally and independently replaced by an organic or inorganic moiety. In some embodiments, such an organic or inorganic moiety is selected from but not limited to ═S, ═Se, ═NR′, —SR′, —SeR′, —N(R′)₂, B(R′)₃, —S—, —Se—, and —N(R′)—, wherein each R′ is independently as defined and described below. In some embodiments, an internucleotidic linkage is a phosphotriester linkage, phosphorothioate diester linkage

[chemical structure]

or modified phosphorothioate triester linkage. It is understood by a person of ordinary skill in the art that the internucleotidic linkage may exist as an anion or cation at a given pH due to the existence of acid or base moieties in the linkage.

[0432] Unless otherwise specified, when used with an oligonucleotide sequence, each of s, s1, s2, s3, s4, s5, s6 and s7 independently represents the following modified internucleotidic linkage as illustrated in Table 2, below.

TABLE 2
Example Modified Internucleotidic Linkage.

| Symbol | Modified Internucleotidic Linkage |
|---|---|
| s | [chemical structure] |
| s1 | [chemical structure] |
| s2 | [chemical structure] |
| s3 | [chemical structure] |
| s4 | [chemical structure] |
| s5 | [chemical structure] |
| s6 | [chemical structure] |
| s7 | [chemical structure] |
| s8 | [chemical structure] |
| s9 | [chemical structure] |
| s10 | [chemical structure] |
| s11 | [chemical structure] |
| s12 | [chemical structure] |
| s13 | [chemical structure] |
| s14 | [chemical structure] |
| s15 | [chemical structure] |
| s16 | [chemical structure] |
| s17 | [chemical structure] |
| s18 | [chemical structure] |

[0433] For instance, (Rp, Sp)-ATsCslGA has 1) a phosphorothioate internucleotidic linkage

[chemical structure]

between T and C; and 2) a phosphorothioate triester internucleotidic linkage having the structure of

[chemical structure]

between C and G. Unless otherwise specified, the Rp/Sp designations preceding an oligonucleotide sequence describe the configurations of chiral linkage phosphorus atoms in the internucleotidic linkages sequentially from 5′ to 3′ of the oligonucleotide sequence. For instance, in (Rp, Sp)-ATsCslGA, the phosphorus in the “s” linkage between T and C has Rp configuration and the phosphorus in “s1” linkage between C and G has Sp configuration. In some embodiments, “All-(Rp)” or “All-(Sp)” is used to indicate that all chiral linkage phosphorus atoms in oligonucleotide have the same Rp or Sp configuration, respectively. For instance. All-(Rp)-GsCsCsTsCsAsGsTsCsTsGsCsTsTsCsGsCsAsCsC (SEQ ID NO: 3) indicates that all the chiral linkage phosphorus atoms in the oligonucleotide have Rp configuration; All-(Sp)-GsCsCsTsCsAsGsTsCsTsGsCsTsTsCsGsCsAsCsC (SEQ ID NO: 4) indicates that all the chiral linkage phosphorus atoms in the oligonucleotide have Sp configuration.

[0434] Oligonucleotide type: As used herein, the phrase “oligonucleotide type” is used to define an oligonucleotide that has a particular base sequence, pattern of backbone linkages (i.e., pattern of internucleotidic linkage types, for example, phosphate, phosphorothioate, etc), pattern of backbone chiral centers (i.e. pattern of linkage phosphorus stereochemistry (Rp/Sp)), and pattern of backbone phosphorus modifications (e.g., pattern of “—XLR¹” groups in formula I). In some embodiments, oligonucleotides of a common designated “type” are structurally identical to one another.

[0435] One of skill in the art will appreciate that synthetic methods of the present invention provide for a degree of control during the synthesis of an oligonucleotide strand such that each nucleotide unit of the oligonucleotide strand can be designed and/or selected in advance to have a particular stereochemistry at the linkage phosphorus and/or a particular modification at the linkage phosphorus, and/or a particular base, and/or a particular sugar. In some embodiments, an oligonucleotide strand is designed and/or selected in advance to have a particular combination of stereocenters at the linkage phosphorus. In some embodiments, an oligonucleotide strand is designed and/or determined to have a particular combination of modifications at the linkage phosphorus. In some embodiments, an oligonucleotide strand is designed and/or selected to have a particular combination of bases. In some embodiments, an oligonucleotide strand is designed and/or selected to have a particular combination of one or more of the above structural characteristics. The present invention provides compositions comprising or consisting of a plurality of oligonucleotide molecules (e.g., chirally controlled oligonucleotide compositions). In some embodiments, all such molecules are of the same type. In some embodiments, provided compositions comprise a plurality of oligonucleotides of different types, typically in pre-determined relative amounts.

[0436] Chiral control: As used herein, “chiral control” refers to an ability to control the stereochemical designation of a chiral linkage phosphorus in a chiral internucleotidic linkage within an oligonucleotide. In some embodiments, a control is achieved through a chiral element that is absent from the sugar and base moieties of an oligonucleotide, for example, in some embodiments, a control is achieved through use of one or more chiral auxiliaries during oligonucleotide preparation as exemplified in the present disclosure. In contrast to chiral control, a person having ordinary skill in the art appreciates that conventional oligonucleotide synthesis which does not use chiral auxiliaries cannot control stereochemistry at a chiral internucleotidic linkage if such conventional oligonucleotide synthesis is used to form the chiral internucleotidic linkage.

[0437] Chirally controlled oligonucleotide composition: The terms “chirally controlled oligonucleotide composition”, “chirally controlled nucleic acid composition”, and the like, as used herein, refers to a composition that comprising a plurality of oligonucleotides (or nucleic acids) which share 1) a common base sequence, 2) a common pattern of backbone linkages, and 3) a common pattern of backbone phosphorus modifications, wherein the plurality of oligonucleotides share the same stereochemistry at one or more chiral internucleotidic linkages (chirally controlled internucleotidic linkages), and the level of the plurality of oligonucleotides in the composition is pre-determined. In some embodiments, each chiral internucleotidic linkage is a chiral controlled internucleotidic linkage, and the composition is a completely chirally controlled oligonucleotide composition. In some embodiments, not all chiral internucleotidic linkages are chiral controlled internucleotidic linkages, and the composition is a partially chirally controlled oligonucleotide composition. In some embodiments, a chirally controlled oligonucleotide composition comprises predetermined levels of individual oligonucleotide or nucleic acids types. For instance, in some embodiments a chirally controlled oligonucleotide composition comprises one oligonucleotide type. In some embodiments, a chirally controlled oligonucleotide composition comprises more than one oligonucleotide type. In some embodiments, a chirally controlled oligonucleotide composition comprises multiple oligonucleotide types.

[0438] Chirally pure: As used herein, the phrase “chirally pure” is used to describe a chirally controlled oligonucleotide composition, or a plurality of oligonucleotides, in which all of the oligonucleotides exist in a single diastereomeric form with respect to the linkage phosphorus.

[0439] Chirally uniform: As used herein, the phrase “chirally uniform” is used to describe an oligonucleotide molecule or type in which all nucleotide units have the same stereochemistry at the linkage phosphorus. For instance, an oligonucleotide whose nucleotide units all have Rp stereochemistry at the linkage phosphorus is chirally uniform. Likewise, an oligonucleotide whose nucleotide units all have Sp stereochemistry at the linkage phosphorus is chirally uniform.

[0440] Predetermined: By predetermined (or pre-determined) is meant deliberately selected, for example as opposed to randomly occurring or achieved without control. Those of ordinary skill in the art, reading the present specification, will appreciate that the present disclosure provides technologies that permit selection of particular chemistry and/or stereochemistry features to be incorporated into oligonucleotide compositions, and further permits controlled preparation of oligonucleotide compositions having such chemistry and/or stereochemistry features. Such provided compositions are “predetermined” as described herein. Compositions that may contain certain oligonucleotides because they happen to have been generated through a process that cannot be controlled to intentionally generate the particular chemistry and/or stereochemistry features is not a “predetermined” composition. In some embodiments, a predetermined composition is one that can be intentionally reproduced (e.g., through repetition of a controlled process). In some embodiments, a predetermined level of a plurality of oligonucleotides in a composition means that the absolute amount, and/or the relative amount (ratio, percentage, etc.) of the plurality of oligonucleotides in the composition is controlled.

[0441] Linkage phosphorus: As defined herein, the phrase “linkage phosphorus” is used to indicate that the particular phosphorus atom being referred to is the phosphorus atom present in the internucleotidic linkage, which phosphorus atom corresponds to the phosphorus atom of a phosphodiester of an internucleotidic linkage as occurs in naturally occurring DNA and RNA. In some embodiments, a linkage phosphorus atom is in a modified internucleotidic linkage, wherein each oxygen atom of a phosphodiester linkage is optionally and independently replaced by an organic or inorganic moiety. In some embodiments, a linkage phosphorus atom is P* of formula I. In some embodiments, a linkage phosphorus atom is chiral. In some embodiments, a chiral linkage phosphorus atom is P* of formula I.

[0442] P-modification: As used herein, the term “P-modification” refers to any modification at the linkage phosphorus other than a stereochemical modification. In some embodiments, a P-modification comprises addition, substitution, or removal of a pendant moiety covalently attached to a linkage phosphorus. In some embodiments, the “P-modification” is —X-L-R¹ wherein each of X, L and R¹ is independently as defined and described herein and below.

[0443] Blockmer: The term “blockmer,” as used herein, refers to an oligonucleotide strand whose pattern of structural features characterizing each individual nucleotide unit is characterized by the presence of at least two consecutive nucleotide units sharing a common structural feature at the internucleotidic phosphorus linkage. By common structural feature is meant common stereochemistry at the linkage phosphorus or a common modification at the linkage phosphorus. In some embodiments, the at least two consecutive nucleotide units sharing a common structure feature at the internucleotidic phosphours linkage are referred to as a “block”.

[0444] In some embodiments, a blockmer is a “stereoblockmer,” e.g., at least two consecutive nucleotide units have the same stereochemistry at the linkage phosphorus. Such at least two consecutive nucleotide units form a “stereoblock.” For instance, (Sp, Sp)-ATsCslGA is a stereoblockmer because at least two consecutive nucleotide units, the Ts and the Cs1, have the same stereochemistry at the linkage phosphorus (both Sp). In the same oligonucleotide (Sp, Sp)-ATsCs1GA, TsCs1 forms a block, and it is a stereoblock.

[0445] In some embodiments, a blockmer is a “P-modification blockmer,” e.g., at least two consecutive nucleotide units have the same modification at the linkage phosphorus. Such at least two consecutive nucleotide units form a “P-modification block”. For instance, (Rp, Sp)-ATsCsGA is a P-modification blockmer because at least two consecutive nucleotide units, the Ts and the Cs, have the same P-modification (i.e., both are a phosphorothioate diester). In the same oligonucleotide of (Rp, Sp)-ATsCsGA, TsCs forms a block, and it is a P-modification block.

[0446] In some embodiments, a blockmer is a “linkage blockmer,” e.g., at least two consecutive nucleotide units have identical stereochemistry and identical modifications at the linkage phosphorus. At least two consecutive nucleotide units form a “linkage block”. For instance, (Rp, Rp)-ATsCsGA is a linkage blockmer because at least two consecutive nucleotide units, the Ts and the Cs, have the same stereochemistry (both Rp) and P-modification (both phosphorothioate). In the same oligonucleotide of (Rp, Rp)-ATsCsGA, TsCs forms a block, and it is a linkage block.

[0447] In some embodiments, a blockmer comprises one or more blocks independently selected from a stereoblock, a P-modification block and a linkage block. In some embodiments, a blockmer is a stereoblockmer with respect to one block, and/or a P-modification blockmer with respect to another block, and/or a linkage blockmer with respect to yet another block. For instance, (Rp, Rp, Rp, Rp, Rp, Sp, Sp, Sp)-AAsTsCsGsAs1Ts1Cs1Gs1ATCG (SEQ ID NO: 5) is a stereoblockmer with respect to the stereoblock AsTsCsGsAs1 (all Rp at linkage phosphorus) or Ts1Cs1Gs1 (all Sp at linkage phosphorus), a P-modification blockmer with respect to the P-modification block AsTsCsGs (all s linkage) or As1Ts1Cs1Gs1 (all s1 linkage), or a linkage blockmer with respect to the linkage block AsTsCsGs (all Rp at linkage phosphorus and all s linkage) or Ts1Cs1Gs1 (all Sp at linkage phosphorus and all s1 linkage).

[0448] Altmer: The term “altmer,” as used herein, refers to an oligonucleotide strand whose pattern of structural features characterizing each individual nucleotide unit is characterized in that no two consecutive nucleotide units of the oligonucleotide strand share a particular structural feature at the internucleotidic phosphorus linkage. In some embodiments, an altmer is designed such that it comprises a repeating pattern. In some embodiments, an altmer is designed such that it does not comprise a repeating pattern.

[0449] In some embodiments, an altmer is a “stereoaltmer,” e.g., no two consecutive nucleotide units have the same stereochemistry at the linkage phosphorus. For instance, (Rp, Sp, Rp, Sp, Rp, Sp, Rp, Sp, Rp, Sp Rp, Sp, Rp, Sp, Rp, Sp, Rp, Sp, Rp)-GsCsCsTsCsAsGsTsCsTsGsCsTsTsCsGsCsAsCsC (SEQ ID NO: 6).

[0450] In some embodiments, an altmer is a “P-modification altmer” e.g., no two consecutive nucleotide units have the same modification at the linkage phosphorus. For instance, All-(Sp)-CAs1GsT, in which each linkage phosphorus has a different P-modification than the others.

[0451] In some embodiments, an altmer is a “linkage altmer,” e.g., no two consecutive nucleotide units have identical stereochemistry or identical modifications at the linkage phosphorus. For instance, (Rp, Sp, Rp, Sp, Rp, Sp, Rp, Sp, Rp, Sp Rp, Sp, Rp, Sp, Rp, Sp, Rp, Sp, Rp)-GsCs1CsTs1CsAs1GsTs1CsTs1GsCs1TsTs2CsGs3CsAs4CsC (SEQ ID NO: 7).

[0452] Sequence: As used herein, the term “sequence” refers to any arrangement of molecules or atoms characteristic of a particular molecule. In some embodiments, in referencing a nucleic acid, a “sequence” refers to any of: base sequence (including length), the pattern of chemical modifications to sugar and base moieties, the pattern of backbone linkages (e.g., pattern of natural phosphate linkages, phosphorothioate linkages, phosphorothioate triester linkages, and combinations thereof), the pattern of backbone chiral centers (e.g., pattern of stereochemistry (Rp/Sp) of chiral internucleotidic linkages), and the pattern of backbone phosphorus modifications (e.g., pattern of modifications on the internucleotidic phosphorus atom, such as —S⁻, and -L-R¹ of formula I). In some embodiments, in referencing a nucleic acid or oligonucleotide, a “sequence” refers to the sequence of bases or base sequence. In some embodiments, in reference to a peptide or protein, a sequence refers to a sequence of amino acids.

[0453] Unimer: The term “unimer,” as used herein, refers to an oligonucleotide strand whose pattern of structural features characterizing each individual nucleotide unit is such that all nucleotide units within the strand share at least one common structural feature at the internucleotidic phosphorus linkage. By common structural feature is meant common stereochemistry at the linkage phosphorus or a common modification at the linkage phosphorus.

[0454] In some embodiments, a unimer is a “stereounimer,” e.g., all nucleotide units have the same stereochemistry at the linkage phosphorus. For instance, Al1-(Sp)-CsAs1GsT, in which all the linkages have Sp phosphorus.

[0455] In some embodiments, a unimer is a “P-modification unimer”, e.g., all nucleotide units have the same modification at the linkage phosphorus. For instance, (Rp, Sp, Rp, Sp, Rp, Sp, Rp, Sp, Rp, Sp Rp, Sp, Rp, Sp, Rp, Sp, Rp, Sp, Rp)-GsCsCsTsCsAsGsTsCsTsGsCsTsTsCsGsCsAsCsC (SEQ ID NO: 6), in which all the internucleotidic linkages are phosphorothioate diester.

[0456] In some embodiments, a unimer is a “linkage unimer,” e.g., all nucleotide units have the same stereochemistry and the same modifications at the linkage phosphorus. For instance, All-(Sp)-GsCsCsTsCsAsGsTsCsTsGsCsTsTsCsGsCsAsCsC (SEQ ID NO: 4), in which all the internucleotidic linkages are phosphorothioate diester having Sp linkage phosphorus.

[0457] Gapmer: As used herein, the term “gapmer” refers to an oligonucleotide strand characterized in that at least one internucleotidic phosphorus linkage of the oligonucleotide strand is a phosphate diester linkage, for example such as those found in naturally occurring DNA or RNA. In some embodiments, more than one internucleotidic phosphorus linkage of the oligonucleotide strand is a phosphate diester linkage such as those found in naturally occurring DNA or RNA. For instance, All-(Sp)-CAs1GsT, in which the internucleotidic linkage between C and A is a phosphate diester linkage.

[0458] Skipmer: As used herein, the term “skipmer” refers to a type of gapmer in which every other internucleotidic phosphorus linkage of the oligonucleotide strand is a phosphate diester linkage, for example such as those found in naturally occurring DNA or RNA, and every other internucleotidic phosphorus linkage of the oligonucleotide strand is a modified internucleotidic linkage. For instance, All-(Sp)-AsTCs1GAs2TCs3G.

[0459] Unless specified otherwise, methods and structures described herein relating to compounds and compositions also apply to pharmaceutically acceptable acid or base addition salts and stereoisomeric forms of these compounds and compositions.

### 2. Detailed Description of Certain Embodiments

[0460] Many technologies for delivering biologically active agents can suffer from an inability to target desired cells or tissues. For example, delivery of biologically active agents to tissues outside the liver remains particularly difficult. Juliano reported that, despite advances at the clinical level, effective delivery of oligonucleotides in vivo remains a major challenge, especially at extra-hepatic sites. Juliano 2016 Nucl. Acids Res. Doi: 10.1093/nar/gkw236. Lou also reported that delivery of siRNA to organs beyond the liver remains the biggest hurdle to using the technology for a host of diseases. Lou 2014 SciBX 7(48); doi:10.1038/scibx.2014.1394. In some embodiments, the present disclosure encompasses surprising findings, including that lipids can be particularly effective at delivering biologically active agents to particular cells and tissues, including cells and tissues outside the liver, including, as non-limiting examples, muscle cells and tissues.

[0461] Among other things, the present disclosure encompasses the recognition that lipids can surprisingly enable and/or promote delivery of biologically active agents to their target location(s) (e.g., cells, tissues, organs, etc.). In some embodiments, the present disclosure provides compositions comprising a biologically active agent and a lipid. In some embodiments, provided compositions and methods are particularly effective for delivering the biologically active agent therein to target locations. In some embodiments, a target location is a cell. In some embodiments, a target location is a type of cell in a tissue. In some embodiments, a target location is a tissue. In some embodiments, a target location is an organ. In some embodiments, at a target location, a biologically active agent of a provided composition is delivered into a cell, e.g., the cytoplasm, nucleus, etc.

[0462] In some embodiments, provided technologies can be utilized to effectively improve delivery of biologically active agents to their target location(s) in a subject, e.g., in a mammal or human subject, etc. In some embodiments, provided technologies provide surprising achievement of efficient and/or effective delivery of biologically active agent(s) into cells (i.e., to intracellular location(s) such as cytoplasm, nucleus, etc.) of a subject.

[0463] In some embodiments, provided technologies permit or facilitate delivery of an effective and/or desired amount of biologically active agent to its target location(s) so that, for example, a comparable or higher level of the biologically active agent is achieved at the target location(s) than is observed when the biologically active agent is administered absent the lipid, in some embodiments, even though a lower amount of the biologically active agent may be administered with the lipid than without. In some embodiments, provided technologies permit or facilitate improved distribution (i.e., increased relative level of biologically active agent at a target location(s) as compared with at a non-target location(s)) relative to an appropriate control (e.g., that level observed when the oligonucleotide is comparably administered absent the lipid). In some embodiments, provided technologies render biologically active agents that have otherwise been considered unsuitable for therapeutic use to be successfully used for treating various diseases, disorders and/or conditions.

[0464] In some embodiments, provided technologies are particularly effective at delivering biologically active agents to particular types of cells and tissues, including, but not limited to, cells and tissues outside the liver (e.g., extra-hepatic), including, but not limited to, muscle cells and tissues. In some embodiments, the present disclosure provides technologies that are surprisingly effective at delivering biologically active agents to muscle cells and tissues, e.g., of skeletal muscles, gastrocnemius, heart, quadriceps, triceps, and/or thoracic diaphragm, etc. In some embodiments, provided technologies effectively deliver a biologically active agent into cells of gastrocnemius muscle of a subject. In some embodiments, provided technologies effectively deliver a biologically active agent into cells of cardiac muscle of a subject. In some embodiments, provided technologies effectively deliver a biologically active agent into cells of quadriceps of a subject. In some embodiments, provided technologies effectively deliver a biologically active agent into cells of triceps of a subject. In some embodiments, provided technologies effectively deliver a biologically active agent into cells of thoracic diaphragm of a subject.

[0465] In some embodiments, provided oligonucleotides comprising lipid moieties provide improved delivery to muscles, e.g., gastrocnemius, triceps, heart, diaphragm, etc., compared to reference oligonucleotides, e.g., having no lipid moieties, having no lipid moieties and different stereochemistry (e.g., chirally controlled v. stereorandom, one pattern of backbone chiral centers v. another pattern of backbone chiral centers, etc.), etc. In some embodiments, provided oligonucleotides comprising lipid moieties provide improved pharmacokinetics compared to reference oligonucleotides. In some embodiments, provided oligonucleotides provides faster clearance from a system than reference oligonucleotides, which, as appreciated by a person having ordinary skill in the art, may provide lower toxicities compared to reference oligonucleotides. Example data are presented in FIGS. 31A to 31D.

[0466] In some embodiments, provided technologies are particularly effective at improving immunogenic properties of biologically active agents. In some embodiments, conjugation of a biologically active agent with a lipid can reduce the immunogenicity of the biologically active agent. In some embodiments, conjugation of a biologically active agent with a lipid can enhance the ability of the biologically active agent to antagonize an immune response. In some embodiments, conjugation of a biologically active agent with a lipid can enhance the ability of the biologically active agent to antagonize an immune response, wherein the immune response is mediated at least partially by TLR9. In some embodiments, conjugation of a lipid to an oligonucleotide improves at least one property of the oligonucleotide. In some embodiments, improved properties include increased activity (e.g., increased ability to induce desirable skipping of a deleterious exon), decreased toxicity, and/or improved distribution to a tissue. In some embodiments, a tissue is muscle tissue. In some embodiments, a tissue is skeletal muscle, gastrocnemius, triceps, heart or diaphragm. In some embodiments, improved properties include reduced hTLR9 agonist activity. In some embodiments, improved properties include hTLR9 antagonist activity. In some embodiments, improved properties include increased hTLR9 antagonist activity. In some embodiments, conjugation of oligonucleotides with lipids can provide hTLR9 antagonist activities, for example, as demonstrated in FIGS. 27 and 28.

### Lipids

[0467] In some embodiments, the present disclosure provides a composition comprising a biologically active agent and a lipid. Many lipids can be utilized in provided technologies in accordance with the present disclosure.

[0468] In some embodiments, a lipid comprises an R^{LD} group, wherein R^{LD} is an optionally substituted, C₁₀-C₈₀ saturated or partially unsaturated aliphatic group, wherein one or more methylene units are optionally and independently replaced by an optionally substituted group selected from C₁-C₆ alkylene, C₁-C₆ alkenylene, —C≡C—, a C₁-C₆ heteroaliphatic moiety, —C(R′)₂—, -Cy-, —O—, —S—, —S—S—, —N(R′)—, —C(O)—, —C(S)—, —C(NR′)—, —C(O)N(R′)—, —N(R′)C(O)N(R′)—, —N(R′)C(O)—, —N(R′)C(O)O—, —OC(O)N(R′)—, —S(O)—, —S(O)₂—, —S(O)₂N(R′)—, —N(R′)S(O)₂— —SC(O)—, —C(O)S—, —OC(O)—, and —C(O)O—, wherein:
[0469] each R′ is independently —R, —C(O)R, —CO₂R, or —SO₂R, or:
   [0470] two R′ are taken together with their intervening atoms to form an optionally substituted aryl, carbocyclic, heterocyclic, or heteroaryl ring;
[0471] -Cy- is an optionally substituted bivalent ring selected from carbocyclylene, arylene, heteroarylene, and heterocyclylene; and
[0472] each R is independently hydrogen, or an optionally substituted group selected from C₁-C₆ aliphatic, phenyl, carbocyclyl, aryl, heteroaryl, or heterocyclyl.

[0473] In some embodiments, a lipid comprises an R^{LD} group, wherein R^{LD} is an optionally substituted, C₁₀-C₆₀ saturated or partially unsaturated aliphatic group, wherein one or more methylene units are optionally and independently replaced by an optionally substituted group selected from C₁-C₆ alkylene, C₁-C₆ alkenylene, —C≡C—, a C₁-C₆ heteroaliphatic moiety, —C(R′)₂—, -Cy-, —O—, —S—, —S—S—, —N(R′)—, —C(O)—, —C(S)—, —C(NR′)—, —C(O)N(R′)—, —N(R′)C(O)N(R′)—, —N(R′)C(O)—, —N(R′)C(O)O—, —OC(O)N(R′)—, —S(O)—, —S(O)₂—, —S(O)₂N(R′)—, —N(R′)S(O)₂— —SC(O)—, —C(O)S—, —OC(O)—, and —C(O)O—, wherein:
[0474] each R′ is independently —R, —C(O)R, —CO₂R, or —SO₂R, or:
   [0475] two R′ are taken together with their intervening atoms to form an optionally substituted aryl, carbocyclic, heterocyclic, or heteroaryl ring;
[0476] -Cy- is an optionally substituted bivalent ring selected from carbocyclylene, arylene, heteroarylene, and heterocyclylene; and
[0477] each R is independently hydrogen, or an optionally substituted group selected from C₁-C₆ aliphatic, phenyl, carbocyclyl, aryl, heteroaryl, or heterocyclyl.

[0478] In some embodiments, a lipid comprises an R^{LD} group, wherein R^{LD} is an optionally substituted, C₁₀-C₄₀ saturated or partially unsaturated aliphatic group, wherein one or more methylene units are optionally and independently replaced by an optionally substituted group selected from C₁-C₆ alkylene, C₁-C₆ alkenylene, —C≡C—, a C₁-C₆ heteroaliphatic moiety, —C(R′)₂—, -Cy-, —O—, —S—, —S—S—, —N(R′)—, —C(O)—, —C(S)—, —C(NR′)—, —C(O)N(R′)—, —N(R′)C(O)N(R′)—, —N(R′)C(O)—, —N(R′)C(O)O—, —OC(O)N(R′)—, —S(O)—, —S(O)₂—, —S(O)₂N(R′)—, —N(R′)S(O)₂— —SC(O)—, —C(O)S—, —OC(O)—, and —C(O)O—, wherein:
[0479] each R′ is independently —R, —C(O)R, —CO₂R, or —SO₂R, or:
   [0480] two R′ are taken together with their intervening atoms to form an optionally substituted aryl, carbocyclic, heterocyclic, or heteroaryl ring;
[0481] -Cy- is an optionally substituted bivalent ring selected from carbocyclylene, arylene, heteroarylene, and heterocyclylene; and
[0482] each R is independently hydrogen, or an optionally substituted group selected from C₁-C₆ aliphatic, phenyl, carbocyclyl, aryl, heteroaryl, or heterocyclyl.

[0483] In some embodiments, R^{LD} is an optionally substituted, C₁₀-C₈₀ saturated or partially unsaturated aliphatic group, wherein one or more methylene units are optionally and independently replaced by an optionally substituted group selected from C₁-C₆ alkylene, C₁-C₆ alkenylene, —C≡C—, a C₁-C₆ heteroaliphatic moiety, —C(R′)₂—, and -Cy-. In some embodiments, R^{LD} is an optionally substituted, C₁₀-C₆₀ saturated or partially unsaturated aliphatic group, wherein one or more methylene units are optionally and independently replaced by an optionally substituted group selected from C₁-C₆ alkylene, C₁-C₆ alkenylene, —C≡C—, a C₁-C₆ heteroaliphatic moiety, —C(R′)₂—, and -Cy-. In some embodiments, R^{LD} is a hydrocarbon group consisting carbon and hydrogen atoms.

[0484] In some embodiments, R^{LD} is an optionally substituted, C₁₀-C₆₀ saturated or partially unsaturated aliphatic group, wherein one or more methylene units are optionally and independently replaced by an optionally substituted group selected from C₁-C₆ alkylene, C₁-C₆ alkenylene, —C≡C—, a C₁-C₆ heteroaliphatic moiety, —C(R′)₂—, and -Cy-. In some embodiments, R^{LD} is an optionally substituted, C₁₀-C₆₀ saturated or partially unsaturated aliphatic group, wherein one or more methylene units are optionally and independently replaced by an optionally substituted group selected from C₁-C₆ alkylene, C₁-C₆ alkenylene, —C≡C—, a C₁-C₆ heteroaliphatic moiety, —C(R′)₂—, and -Cy-. In some embodiments, R^{LD} is a hydrocarbon group consisting carbon and hydrogen atoms.

[0485] In some embodiments, R^{LD} is an optionally substituted, C₁₀-C₄₀ saturated or partially unsaturated aliphatic group, wherein one or more methylene units are optionally and independently replaced by an optionally substituted group selected from C₁-C₆ alkylene, C₁-C₆ alkenylene, —C≡C—, a C₁-C₆ heteroaliphatic moiety, —C(R′)₂—, and -Cy-. In some embodiments, R^{LD} is an optionally substituted, C₁₀-C₆₀ saturated or partially unsaturated aliphatic group, wherein one or more methylene units are optionally and independently replaced by an optionally substituted group selected from C₁-C₆ alkylene, C₁-C₆ alkenylene, —C≡C—, a C₁-C₆ heteroaliphatic moiety, —C(R′)₂—, and -Cy-. In some embodiments, R^{LD} is a hydrocarbon group consisting carbon and hydrogen atoms.

[0486] The aliphatic group of R^{LD} can be a variety of suitable length. In some embodiments, it is C₁₀-C₈₀. In some embodiments, it is C₁₀-C₇₅. In some embodiments, it is C₁₀-C₇₀. In some embodiments, it is C₁₀-C₆₅. In some embodiments, it is C₁₀-C₆₀. In some embodiments, it is C₁₀-C₅₀. In some embodiments, it is C₁₀-C₄₀. In some embodiments, it is C₁₀-C₃₅. In some embodiments, it is C₁₀-C₃₀. In some embodiments, it is C₁₀-C₂₅. In some embodiments, it is C₁₀-C₂₄. In some embodiments, it is C₁₀-C₂₃. In some embodiments, it is C₁₀-C₂₂. In some embodiments, it is C₁₀-C₂₁. In some embodiments, it is C₁₂-C₂₂. In some embodiments, it is C₁₃-C₂₂. In some embodiments, it is C₁₄-C₂₂. In some embodiments, it is C₁₅—C₂₂. In some embodiments, it is C₁₆-C₂₂. In some embodiments, it is C₁₇-C₂₂. In some embodiments, it is C₁₈-C₂₂. In some embodiments, it is C₁₀-C₂₀. In some embodiments, the lower end of the range is C₁₀, C₁₁, C₁₂, C₁₃, C₁₄, C₁₅, C₁₆, C₁₇, or C₁₈. In some embodiments, the higher end of the range is C₁₈, C₁₉, C₂₀, C₂₁, C₂₂, C₂₃, C₂₄, C₂₅, C₂₆, C₂₇, C₂₈, C₂₉, C₃₀, C₃₅, C₄₀, C₄₅, C₅₀, C₅₅, or C₆₀. In some embodiments, it is C₁₀. In some embodiments, it is C₁₁. In some embodiments, it is C₁₂. In some embodiments, it is C₁₃. In some embodiments, it is C₁₄. In some embodiments, it is C₁₅. In some embodiments, it is C₁₆. In some embodiments, it is C₁₇. In some embodiments, it is C₁₈. In some embodiments, it is C₁₉. In some embodiments, it is C₂₀. In some embodiments, it is C₂₁. In some embodiments, it is C₂₂. In some embodiments, it is C₂₃. In some embodiments, it is C₂₄. In some embodiments, it is C₂₅. In some embodiments, it is C₃₀. In some embodiments, it is C₃₅. In some embodiments, it is C₄₀. In some embodiments, it is C₄₅. In some embodiments, it is C₅₀. In some embodiments, it is C₅₅. In some embodiments, it is C₆₀.

[0487] In some embodiments, a lipid comprises no more than one R^{LD} group. In some embodiments, a lipid comprises two or more R^{LD} groups.

[0488] In some embodiments, a lipid is conjugated to a biologically active agent, optionally through a linker, as a moiety comprising an R^{LD} group. In some embodiments, a lipid is conjugated to a biologically active agent, optionally through a linker, as a moiety comprising no more than one R^{LD} group. In some embodiments, a lipid is conjugated to a biologically active agent, optionally through a linker, as an R^{LD} group. In some embodiments, a lipid is conjugated to a biologically active agent, optionally through a linker, as a moiety comprising two or more R^{LD} groups.

[0489] In some embodiments, R^{LD} is an optionally substituted, C₁₀-C₄₀ saturated or partially unsaturated, aliphatic chain. In some embodiments, a lipid comprises an optionally substituted C₁₀-C₄₀ saturated or partially unsaturated, aliphatic chain.

[0490] In some embodiments, R^{LD} is an optionally substituted C₁₀-C₄₀ linear, saturated or partially unsaturated, aliphatic chain. In some embodiments, a lipid comprises an optionally substituted C₁₀-C₄₀ linear, saturated or partially unsaturated, aliphatic chain.

[0491] In some embodiments, R^{LD} is a C₁₀-C₄₀ linear, saturated or partially unsaturated, aliphatic chain, optionally substituted with one or more C₁₋₄ aliphatic groups. In some embodiments, a lipid comprises a C₁₀-C₄₀ linear, saturated or partially unsaturated, aliphatic chain, optionally substituted with one or more C₁₋₄ aliphatic groups. In some embodiments, R^{LD} is a C₁₀-C₄₀ linear, saturated or partially unsaturated, aliphatic chain, optionally substituted with one or more C₁₋₂ aliphatic groups. In some embodiments, a lipid comprises a C₁₀-C₄₀ linear, saturated or partially unsaturated, aliphatic chain, optionally substituted with one or more C₁₋₂ aliphatic groups. In some embodiments, R^{LD} is a C₁₀-C₄₀ linear, saturated or partially unsaturated, aliphatic chain, optionally substituted with one or more methyl groups. In some embodiments, a lipid comprises a C₁₀-C₄₀ linear, saturated or partially unsaturated, aliphatic chain, optionally substituted with one or more methyl groups.

[0492] In some embodiments, R^{LD} is an unsubstituted C₁₀-C₄₀ linear, saturated or partially unsaturated, aliphatic chain. In some embodiments, a lipid comprises an unsubstituted C₁₀-C₄₀ linear, saturated or partially unsaturated, aliphatic chain.

[0493] In some embodiments, a lipid comprises no more than one optionally substituted C₁₀-C₄₀ linear, saturated or partially unsaturated, aliphatic chain. In some embodiments, a lipid comprises two or more optionally substituted C₁₀-C₄₀ linear, saturated or partially unsaturated, aliphatic chain.

[0494] In some embodiments, R^{LD} is an optionally substituted, C₁₀-C₆₀ saturated or partially unsaturated, aliphatic chain. In some embodiments, a lipid comprises an optionally substituted C₁₀-C₆₀ saturated or partially unsaturated, aliphatic chain.

[0495] In some embodiments, R^{LD} is an optionally substituted C₁₀-C₆₀ linear, saturated or partially unsaturated, aliphatic chain. In some embodiments, a lipid comprises an optionally substituted C₁₀-C₆₀ linear, saturated or partially unsaturated, aliphatic chain.

[0496] In some embodiments, R^{LD} is a C₁₀-C₆₀ linear, saturated or partially unsaturated, aliphatic chain, optionally substituted with one or more C₁₋₄ aliphatic groups. In some embodiments, a lipid comprises a C₁₀-C₆₀ linear, saturated or partially unsaturated, aliphatic chain, optionally substituted with one or more C₁₋₄ aliphatic groups. In some embodiments, R^{LD} is a C₁₀-C₆₀ linear, saturated or partially unsaturated, aliphatic chain, optionally substituted with one or more C₁₋₂ aliphatic groups. In some embodiments, a lipid comprises a C₁₀-C₆₀ linear, saturated or partially unsaturated, aliphatic chain, optionally substituted with one or more C₁₋₂ aliphatic groups. In some embodiments, R^{LD} is a C₁₀-C₆₀ linear, saturated or partially unsaturated, aliphatic chain, optionally substituted with one or more methyl groups. In some embodiments, a lipid comprises a C₁₀-C₆₀ linear, saturated or partially unsaturated, aliphatic chain, optionally substituted with one or more methyl groups.

[0497] In some embodiments, R^{LD} is an unsubstituted C₁₀-C₆₀ linear, saturated or partially unsaturated, aliphatic chain. In some embodiments, a lipid comprises an unsubstituted C₁₀-C₆₀ linear, saturated or partially unsaturated, aliphatic chain.

[0498] In some embodiments, a lipid comprises no more than one optionally substituted C₁₀-C₆₀ linear, saturated or partially unsaturated, aliphatic chain. In some embodiments, a lipid comprises two or more optionally substituted C₁₀-C₆₀ linear, saturated or partially unsaturated, aliphatic chain.

[0499] In some embodiments, R^{LD} is an optionally substituted, C₁₀-C₈₀ saturated or partially unsaturated, aliphatic chain. In some embodiments, a lipid comprises an optionally substituted C₁₀-C₈₀ saturated or partially unsaturated, aliphatic chain.

[0500] In some embodiments, R^{LD} is an optionally substituted C₁₀-C₈₀ linear, saturated or partially unsaturated, aliphatic chain. In some embodiments, a lipid comprises an optionally substituted C₁₀-C₈₀ linear, saturated or partially unsaturated, aliphatic chain.

[0501] In some embodiments, R^{LD} is a C₁₀-C₈₀ linear, saturated or partially unsaturated, aliphatic chain, optionally substituted with one or more C₁₋₄ aliphatic groups. In some embodiments, a lipid comprises a C₁₀-C₈₀ linear, saturated or partially unsaturated, aliphatic chain, optionally substituted with one or more C₁₋₄ aliphatic groups. In some embodiments, R^{LD} is a C₁₀-C₈₀ linear, saturated or partially unsaturated, aliphatic chain, optionally substituted with one or more C₁₋₂ aliphatic groups. In some embodiments, a lipid comprises a C₁₀-C₈₀ linear, saturated or partially unsaturated, aliphatic chain, optionally substituted with one or more C₁₋₂ aliphatic groups. In some embodiments, R^{LD} is a C₁₀-C₈₀ linear, saturated or partially unsaturated, aliphatic chain, optionally substituted with one or more methyl groups. In some embodiments, a lipid comprises a C₁₀-C₈₀ linear, saturated or partially unsaturated, aliphatic chain, optionally substituted with one or more methyl groups.

[0502] In some embodiments, R^{LD} is an unsubstituted C₁₀-C₈₀ linear, saturated or partially unsaturated, aliphatic chain. In some embodiments, a lipid comprises an unsubstituted C₁₀-C₈₀ linear, saturated or partially unsaturated, aliphatic chain.

[0503] In some embodiments, a lipid comprises no more than one optionally substituted C₁₀-C₈₀ linear, saturated or partially unsaturated, aliphatic chain. In some embodiments, a lipid comprises two or more optionally substituted C₁₀-C₈₀ linear, saturated or partially unsaturated, aliphatic chain.

[0504] In some embodiments, R^{LD} is or comprises a C₁₀ saturated linear aliphatic chain. In some embodiments, R^{LD} is or comprises a C₁₀ partially unsaturated linear aliphatic chain. In some embodiments, R^{LD} is or comprises a C₁₁ saturated linear aliphatic chain. In some embodiments, R^{LD} is or comprises a C₁₁ partially unsaturated linear aliphatic chain. In some embodiments, R^{LD} is or comprises a C₁₂ saturated linear aliphatic chain. In some embodiments, R^{LD} is or comprises a C₁₂ partially unsaturated linear aliphatic chain. In some embodiments, R^{LD} is or comprises a C₁₃ saturated linear aliphatic chain. In some embodiments, R^{LD} is or comprises a C₁₃ partially unsaturated linear aliphatic chain. In some embodiments, R^{LD} is or comprises a C₁₄ saturated linear aliphatic chain. In some embodiments, R^{LD} is or comprises a C₁₄ partially unsaturated linear aliphatic chain. In some embodiments, R^{LD} is or comprises a C₁₅ saturated linear aliphatic chain. In some embodiments, R^{LD} is or comprises a C₁₅ partially unsaturated linear aliphatic chain. In some embodiments, R^{LD} is or comprises a C₁₆ saturated linear aliphatic chain. In some embodiments, R^{LD} is or comprises a C₁₆ partially unsaturated linear aliphatic chain. In some embodiments, R^{LD} is or comprises a C₁₇ saturated linear aliphatic chain. In some embodiments, R^{LD} is or comprises a C₁₇ partially unsaturated linear aliphatic chain. In some embodiments, R^{LD} is or comprises a C₁₈ saturated linear aliphatic chain. In some embodiments, R^{LD} is or comprises a C₁₈ partially unsaturated linear aliphatic chain. In some embodiments, R^{L}D is or comprises a C₁₉ saturated linear aliphatic chain. In some embodiments, R^{LD} is or comprises a C₁₉ partially unsaturated linear aliphatic chain. In some embodiments, R^{LD} is or comprises a C₂₀ saturated linear aliphatic chain. In some embodiments, R^{LD} is or comprises a C₂₀ partially unsaturated linear aliphatic chain. In some embodiments, R^{LD} is or comprises a C₂₁ saturated linear aliphatic chain. In some embodiments, R^{LD} is or comprises a C₂₁ partially unsaturated linear aliphatic chain. In some embodiments, R^{LD} is or comprises a C₂₂ saturated linear aliphatic chain. In some embodiments, R^{LD} is or comprises a C₂₂ partially unsaturated linear aliphatic chain. In some embodiments, R^{LD} is or comprises a C₂₃ saturated linear aliphatic chain. In some embodiments, R^{LD} is or comprises a C₂₃ partially unsaturated linear aliphatic chain. In some embodiments, R^{LD} is or comprises a C₂₄ saturated linear aliphatic chain. In some embodiments, R^{LD} is or comprises a C₂₄ partially unsaturated linear aliphatic chain. In some embodiments, R^{L}D is or comprises a C₂₅ saturated linear aliphatic chain. In some embodiments, R^{LD} is or comprises a C₂₅ partially unsaturated linear aliphatic chain. In some embodiments, R^{LD} is or comprises a C₂₆ saturated linear aliphatic chain. In some embodiments, R^{LD} is or comprises a C₂₆ partially unsaturated linear aliphatic chain. In some embodiments, R^{LD} is or comprises a C₂₇ saturated linear aliphatic chain. In some embodiments, R^{LD} is or comprises a C₂₇ partially unsaturated linear aliphatic chain. In some embodiments, R^{LD} is or comprises a C₂₈ saturated linear aliphatic chain. In some embodiments, R^{LD} is or comprises a C₂₈ partially unsaturated linear aliphatic chain. In some embodiments, R^{LD} is or comprises a C₂₉ saturated linear aliphatic chain. In some embodiments, R^{LD} is or comprises a C₂₉ partially unsaturated linear aliphatic chain. In some embodiments, R^{LD} is or comprises a C₃₀ saturated linear aliphatic chain. In some embodiments, R^{LD} is or comprises a C₃₀ partially unsaturated linear aliphatic chain.

[0505] In some embodiments, a lipid has the structure of R^{LD}—OH. In some embodiments, a lipid has the structure of R^{LD}—C(O)OH. In some embodiments, R^{LD} is

[chemical structure]

Example oligonucleotides comprising such R^{D} groups are illustrated, e.g., in Table 4A. In some embodiments, a lipid is lauric acid, myristic acid, palmitic acid, stearic acid, oleic acid, linoleic acid, alpha-linolenic acid, gamma-linolenic acid, docosahexaenoic acid (DHA or cis-DHA), turbinaric acid, arachidonic acid, and dilinoleyl. In some embodiments, a lipid has a structure of:

[chemical structure]

Example oligonucleotides comprising conjugation with these lipids are illustrated, e.g., in Table 4.

[0506] In some embodiments, a lipid is, comprises or consists of any of: an at least partially hydrophobic or amphiphilic molecule, a phospholipid, a triglyceride, a diglyceride, a monoglyceride, a fat-soluble vitamin, a sterol, a fat and a wax. In some embodiments, a lipid is any of: a fatty acid, glycerolipid, glycerophospholipid, sphingolipid, sterol lipid, prenol lipid, saccharolipid, polyketide, and other molecule.

[0507] In some embodiments, a lipid is conjugated to a biologically active agent optionally through a linker moiety. A person having ordinary skill in the art appreciates that various technologies can be utilized to conjugate lipids to biologically active agent in accordance with the present disclosure. For example, for lipids comprising carboxyl groups, such lipids can be conjugated through the carboxyl groups.

[0508] Lipids can be conjugated to oligonucleotides optionally through linkers. Various types of linkers in the art can be utilized in accordance of the present disclosure. In some embodiments, a linker comprise a phosphate group, which can, for example, be used for conjugating lipids through chemistry similar to those employed in oligonucleotide synthesis. In some embodiments, a linker comprises an amide, ester, or ether group.

[0509] In some embodiments, a linker has the structure of -L^{LD}-. In some embodiments, L^{LD} is T^{LD} having the structure of

[chemical structure]

wherein each variable is independently as defined and described. In some embodiments, T^{LD} has the structure of formula I. In some embodiments, T^{LD} with the 5′-O— of an oligonucleotide chain form a phosphorothioate linkage (—OP(O)(S⁻)O—). In some embodiments, T^{LD} with the 5′-O— of an oligonucleotide chain form an Sp phosphorothioate linkage. In some embodiments, T^{LD} with the 5′-O— of an oligonucleotide chain form an Rp phosphorothioate linkage. In some embodiments, T^{LD} with the 5′-O— of an oligonucleotide chain form a phosphate linkage (—OP(O)(O—)O—). In some embodiments, T^{LD} with the 5′-O— of an oligonucleotide chain form a phosphorodithioate linkage. In some embodiments, L^{LD} is -L-T^{LD}-. In some embodiments, Y connects to -L- and —Z— is a covalent bond, so that P directly connects to a hydroxyl group of the oligonucleotide chain. In some embodiments, P connects to the 5′-end hydroxyl (5′-O—) to form a phosphate group (natural phosphate linkage) or phosphorothioate group (phosphorothioate linkage). In some embodiments, the phosphorothioate linkage is chirally controlled and can be either Rp or Sp. Unless otherwise specified, chiral centers in the linkers (e.g., P in T^{LD}) can be either stereorandom or chirally controlled, and they are not considered as part of the backbone chiral centers, e.g., for determining whether a composition is chirally controlled. In some embodiments, L^{LD} is —NH—(CH₂)₆-T^{LD}-. In some embodiments, L^{LD} is —C(O)—NH—(CH₂)₆-T^{LD}-.

[0510] In some embodiments, a linker has the structure of -L-. In some embodiments, after conjugation to oligonucleotides, a lipid forms a moiety having the structure of -L-R^{LD}, wherein each of L and R^{LD} is independently as defined and described herein.

[0511] In some embodiments, -L- comprises a bivalent aliphatic chain. In some embodiments, -L- comprises a phosphate group. In some embodiments, -L- comprises a phosphorothioate group. In some embodiments, -L- has the structure of —C(O)NH—(CH₂)₆—OP(═O)(S⁻)—. In some embodiments, -L- has the structure of —C(O)NH—(CH₂)₆—OP(═O)(O⁻)—.

[0512] Lipids, optionally through linkers, can be conjugated to oligonucleotides at various suitable locations. In some embodiments, lipids are conjugated through the 5′-OH group. In some embodiments, lipids are conjugated through the 3′-OH group. In some embodiments, lipids are conjugated through one or more sugar moieties. In some embodiments, lipids are conjugated through one or more bases. In some embodiments, lipids are incorporated through one or more internucleotidic linkages. In some embodiments, an oligonucleotide may contain multiple conjugated lipids which are independently conjugated through its 5′-OH, 3′-OH, sugar moieties, base moieties and/or internucleotidic linkages.

[0513] In some embodiments, a linker is a moiety that connects two parts of a composition; as a non-limiting example, a linker physically connects a active compound to a lipid. Non-limiting examples of suitable linkers include: an uncharged linker; a charged linker; a linker comprising an alkyl; a linker comprising a phosphate; a branched linker; an unbranched linker; a linker comprising at least one cleavage group; a linker comprising at least one redox cleavage group; a linker comprising at least one phosphate-based cleavage group; a linker comprising at least one acid-cleavage group; a linker comprising at least one ester-based cleavage group; a linker comprising at least one peptide-based cleavage group.

[0514] In some embodiments, a lipid is conjugated to an active compound optionally through a linker moiety. A person having ordinary skill in the art appreciates that various technologies can be utilized to conjugate lipids to active compound in accordance with the present disclosure. For example, for lipids comprising carboxyl groups, such lipids can be conjugated through the carboxyl groups. In some embodiments, a lipid is conjugated through a linker having the structure of -L-, wherein L is as defined and described in formula I. In some embodiments, L comprises a phosphate diester or modified phosphate diester moiety. In some embodiments, a compound formed by lipid conjugation has the structure of (R^{LD}-L-)ₓ-(active compound), wherein x is 1 or an integer greater than 1, and each of R^{LD} and L is independently as defined and described herein. In some embodiments, x is 1. In some embodiments, x is greater than 1. In some embodiments, x is 1-50. In some embodiments, an active compound is an oligonucleotide. For example, in some embodiments, a conjugate has the following structures:

[chemical structure]

[0515] In some embodiments, a linker is selected from: an uncharged linker; a charged linker; a linker comprising an alkyl; a linker comprising a phosphate; a branched linker; an unbranched linker; a linker comprising at least one cleavage group; a linker comprising at least one redox cleavage group; a linker comprising at least one phosphate-based cleavage group; a linker comprising at least one acid-cleavage group; a linker comprising at least one ester-based cleavage group; and a linker comprising at least one peptide-based cleavage group. Other non-limiting examples of linkers are described herein, or detailed in FIG. 7. In some embodiments, a linker has the structure of -L^{LD}-. In some embodiments, a linker has the structure of -L-. In some embodiments, a linker comprises a linkage of formula I. In some embodiments, a linker is —C(O)NH—(CH₂)₆-L-, wherein L¹ has the structure of formula I as described herein. In some embodiments, a linker is —C(O)NH—(CH₂)₆—O—P(═O)(SR¹)—O—. In some embodiments, R¹ is —H, and a linker is —C(O)NH—(CH₂)₆—O—P(═O)(SH)—O—, in some conditions, e.g., certain pH, —C(O)NH—(CH₂)₆—O—P(═O)(S⁻)—O—. In some embodiments, a linker is —C(O)NH—(CH₂)₆—O—P(═S)(SR¹)—O—. In some embodiments, R¹ is —H, and a linker is —C(O)NH—(CH₂)₆—O—P(═S)(SH)—O—, in some conditions, e.g., certain pH, —C(O)NH—(CH₂)₆—O—P(═S)(S)—O—. In some embodiments, a linker is —C(O)NH—(CH₂)₆—O—P(═S)(OR¹)—O—, wherein R¹ is —CH₂CH₂CN. In some embodiments, a linker is —C(O)NH—(CH₂)₆—O—P(═S)(SR¹)—O—, wherein R¹ is —CH₂CH₂CN. In some embodiments, a provided oligonucleotide is coupled with a linker and forms a structure of H-linker-oligonucleotide. In some embodiments, a provided oligonucleotide is conjugated to a lipid and forms the structure of lipind-linker-oligonucleotide, e.g., R^{LD}-L^{LD}-oligonucleotide. In some embodiments, the —O— end of a linker is connected to an oligonucleotide. In some embodiments, the —O— end of a linker is connected to the 5′-end oligonucleotide (—O— being the oxygen in the 5′-OH).

[0516] In some embodiments, a linker comprises a PO (phosphodiester linkage), a PS (phosphorothioate linkage) or PS2 (phosphorodithioate linkage). A non-limiting example including a PS linker is shown below. In some embodiments, a linker is —O—P(O)(OH)—O-[phosphodiester], —O—P(O)(SH)—O— [phosphorothioate] or —O—P(S)(SH)—O-[phosphorodithioate]. In some embodiments, a linker comprises a C6 amino moiety (—NH—(CH₂)₆—), which is illustrated below. In some embodiments, a linker comprises a C6 amino bound to a PO, a PS, or PS2. In some embodiments, a linker is a C6 amino bound to a PO, a PS, or PS2. In some embodiments, a linker, e.g., L^{LD} or L, is —C(O)—NH—(CH₂)₆—P(O)(OH)—. In some embodiments, a linker, e.g., L^{LD} or L, is —C(O)—NH—(CH₂)₆—P(O)(OH)—, wherein —C(O)— is connected to a lipid moiety and —P(O)(OH)— is connected to an oligonucleotide chain. In some embodiments, a linker, e.g., L^{LD} or L, is —C(O)—NH—(CH₂)₆—P(O)(OH)—, wherein —C(O)— is connected to a lipid moiety and —P(O)(OH)— is connected to the 5′-O— of an oligonucleotide chain. In some embodiments, a linker, e.g., L^{LD} or L, is —C(O)—NH—(CH₂)₆—P(O)(OH)—, wherein —C(O)— is connected to a lipid moiety and —P(O)(OH)— is connected to the 3′-O— of an oligonucleotide chain. In some embodiments, a linker, e.g., L^{LD} or L, is —C(O)—NH—(CH₂)₆—P(O)(SH)—. In some embodiments, a linker, e.g., L^{LD} or L, is —C(O)—NH—(CH₂)₆—P(O)(SH)—, wherein —C(O)— is connected to a lipid moiety and —P(O)(SH)— is connected to an oligonucleotide chain. In some embodiments, a linker, e.g., L^{LD} or L, is —C(O)—NH—(CH₂)₆—P(O)(SH)—, wherein —C(O)— is connected to a lipid moiety and —P(O)(SH)— is connected to the 5′-O— of an oligonucleotide chain. In some embodiments, a linker, e.g., L^{LD} or L, is —C(O)—NH—(CH₂)₆—P(O)(SH)—, wherein —C(O)— is connected to a lipid moiety and —P(O)(SH)— is connected to the 3′-O— of an oligonucleotide chain. In some embodiments, a linker, e.g., L^{LD} or L, is —C(O)—NH—(CH₂)₆—P(S)(SH)—. In some embodiments, a linker, e.g., L^{LD} or L, is —C(O)—NH—(CH₂)₆—P(S)(SH)—, wherein —C(O)— is connected to a lipid moiety and —P(S)(SH)— is connected to an oligonucleotide chain. In some embodiments, a linker, e.g., L^{LD} or L, is —C(O)—NH—(CH₂)₆—P(S)(SH)—, wherein —C(O)— is connected to a lipid moiety and —P(S)(SH)— is connected to the 5′-O— of an oligonucleotide chain. In some embodiments, a linker, e.g., L^{LD} or L, is —C(O)—NH—(CH₂)₆—P(S)(SH)—, wherein —C(O)— is connected to a lipid moiety and —P(S)(SH)— is connected to the 3′-O— of an oligonucleotide chain. As appreciated by a person having ordinary skill in the art, at certain pH —P(O)(OH)—, —P(O)(SH)—, —P(S)(SH)— may exist as —P(O)(O—)—, —P(O)(S—)—, —P(S)(S—)—, respectively. In some embodiments, a lipid moiety is R^{LD}.

[chemical structure]

[0517] Various chemistry and linkers can be used for conjugation in accordance with the present disclosure. For example, lipids, targeting components, etc. can be conjugated to oligonucleotides through linkers using chemistry as described below either on solid phase or insolution phase to prepare certain provided oligonucleotides, for example, those described in Table 4 (WV-2538, WV-2733, WV-2734, WV-2578 to WV-2588, WV-2807, WV-2808, WV-3022 to WV-3027, WV-3029 to WV-3038, WV-3084 to WV-3089, WV-3357 to WV-3366, WV-3517, WV-3520, WV-3543 to WV-3560, WV-3753, WV-3754, WV-3820, WV-3821, WV-3855, WV-3856, WV-3976, WV-3977, WV-3979, WV-3980, WV-4106, WV-4107, etc.):

[chemical structure]

[chemical structure]

[0518] Non-limiting examples of protocols for conjugation of a lipid to a biologically active agent (e.g., an oligonucleotide) using a linker are described, e.g., in the Examples.

[0519] In some embodiments, a lipid is not conjugated to a biologically active agent.

### Biologically Active Agents

[0520] Various biologically active agents can be effectively delivered to their targets in accordance with the present disclosure. In some embodiments, a biologically active agent is selected from the group consisting of: a small molecule, a peptide, a protein, a component of a CRISPR-Cas system, a carbohydrate, a therapeutic agent, a chemotherapeutic agent, a vaccine, a nucleic acid, and a lipid. In some embodiments, a nucleic acid is an oligonucleotide, an antisense oligonucleotide, an RNAi agent, a miRNA, immunomodulatory nucleic acid, an aptamer, a Piwi-interacting RNA (piRNA), a small nucleolar RNA (snoRNA), a ribozyme, a mRNA, a lncRNA, a ncRNA, an antigomir (e.g., an antagonist to a miRNA, lncRNA, ncRNA or other nucleic acid), a plasmid, a vector, or a portion thereof.

[0521] In some embodiments, a biologically active agent is a small molecule. In some embodiments, a biologically active agent is selected from biologics. In some embodiments, a biologically active agent is a protein. In some embodiments, a biologically active agent is an antibody. In some embodiments, a biologically active agent is a peptide.

[0522] In some embodiments, a biologically active agent is an oligonucleotide. In some embodiments, the present disclosure provides compositions comprising an oligonucleotide and a lipid. Among other things, such compositions are surprisingly effective at delivering oligonucleotides to their target locations, in some embodiments, delivering oligonucleotides into the cells at the target locations. In some embodiments, provided technologies are surprisingly effective at delivering oligonucleotides to muscle cells, tissues, etc. As will be appreciated by a person having ordinary skill in the art, oligonucleotides of various sequences, functions, etc., can be included in provided technologies and can be efficiently and effectively delivered to target locations, including into cells, in accordance with the present disclosure.

[0523] In some embodiments, provided technologies can be utilized to effectively improve delivery of oligonucleotides to their target location(s) in a subject, e.g., in a mammal or human subject, etc. In some embodiments, provided technologies provide surprising achievement of efficient and/or effective delivery of oligonucleotide(s) into cells (i.e., to intracellular location(s) such as cytoplasm, nucleus, etc.) of a subject.

[0524] In some embodiments, provided technologies permit or facilitate delivery of an effective and/or desired amount of oligonucleotide to its target location(s) so that, for example, a comparable or higher level of the oligonucleotide is achieved at the target location(s) than is observed when the oligonucleotide is administered absent the lipid, in some embodiments, even though a lower amount of the oligonucleotide may be administered with the lipid than without. In some embodiments, provided technologies permit or facilitate improved distribution (i.e., increased relative level of oligonucleotide at a target location(s) as compared with at a non-target location(s)) relative to an appropriate control (e.g., that level observed when the oligonucleotide is comparably administered absent the lipid). In some embodiments, provided technologies render oligonucleotides that have otherwise been considered unsuitable for therapeutic use to be successfully used for treating various diseases, disorders and/or conditions.

[0525] In some embodiments, provided technologies are particularly effective at delivering oligonucleotides to particular types of cells and tissues, including, but not limited to, cells and tissues outside the liver (e.g., extra-hepatic), including, but not limited to, muscle cells and tissues. In some embodiments, the present disclosure provides technologies that are surprisingly effective at delivering oligonucleotides to muscle cells and tissues, e.g., of gastrocnemius, heart, quadriceps, triceps, and/or thoracic diaphragm, etc. In some embodiments, provided technologies effectively deliver an oligonucleotide into cells of gastrocnemius muscle of a subject. In some embodiments, provided technologies effectively deliver an oligonucleotide into cells of cardiac muscle of a subject. In some embodiments, provided technologies effectively deliver an oligonucleotide into cells of quadriceps of a subject. In some embodiments, provided technologies effectively deliver an oligonucleotide into cells of thoracic diaphragm of a subject.

[0526] In some embodiments, a provided composition is an oligonucleotide composition comprising one ore more lipids, and a plurality of oligonucleotides, which share:
[0527] 1) a common base sequence;
[0528] 2) a common pattern of backbone linkages; and
[0529] 3) a common pattern of backbone phosphorus modifications;
   wherein one or more oligonucleotides of the plurality are independently and optionally conjugated to the lipids.

[0530] In some embodiments, a provided composition is an oligonucleotide composition comprising a plurality of oligonucleotides, which share:
[0531] 1) a common base sequence;
[0532] 2) a common pattern of backbone linkages; and
[0533] 3) a common pattern of backbone phosphorus modifications;
   wherein one or more oligonucleotides of the plurality are independently conjugated to one or more lipids.

[0534] In some embodiments, a provided composition is a chirally controlled oligonucleotide composition comprising one or more lipids, and a plurality of oligonucleotides, which share:
[0535] 1) a common base sequence;
[0536] 2) a common pattern of backbone linkages; and
[0537] 3) a common pattern of backbone phosphorus modifications;
   wherein:
[0538] the composition is chirally controlled in that the plurality of oligonucleotides share the same stereochemistry at one or more chiral internucleotidic linkages, and level of the plurality of oligonucleotides in the composition is pre-determined;
[0539] one or more oligonucleotides of the plurality are optionally and independently conjugated to one ore more lipids; and
   one or more oligonucleotides of the plurality are optionally and independently conjugated to a target component.

[0540] In some embodiments, a provided composition is a chirally controlled oligonucleotide composition comprising a plurality of oligonucleotides, which share:
[0541] 1) a common base sequence;
[0542] 2) a common pattern of backbone linkages; and
[0543] 3) a common pattern of backbone phosphorus modifications;
   wherein:
[0544] the composition is chirally controlled in that the plurality of oligonucleotides share the same stereochemistry at one or more chiral internucleotidic linkages, and level of the plurality of oligonucleotides in the composition is pre-determined;
[0545] one or more oligonucleotides of the plurality are independently conjugated to one or more lipids; and
[0546] one or more oligonucleotides of the plurality are optionally and independently conjugated to a target component.

[0547] In some embodiments, a provided composition is a chirally controlled oligonucleotide composition comprising one or more lipids, and a plurality of oligonucleotides, which share:
[0548] 1) a common base sequence;
[0549] 2) a common pattern of backbone linkages; and
[0550] 3) a common pattern of backbone phosphorus modifications;
   wherein:
[0551] the composition is chirally controlled in that the plurality of oligonucleotides share the same stereochemistry at one or more chiral internucleotidic linkages, and level of the plurality of oligonucleotides in the composition is pre-determined;
[0552] one or more oligonucleotides of the plurality are optionally and independently conjugated to one ore more lipids; and
[0553] one or more oligonucleotides of the plurality are optionally and independently conjugated to a target component.

[0554] In some embodiments, a common base sequence hybridizes with a transcript of dystrophin, myostatin, Huntingtin, a myostatin receptor, ActRIIB, ActRIIA, DMPK, Malat1, SMN2, dystrophia myotonica protein kinase (DMPK), Proprotein convertase subtilisin/kexin type 9 (PCSK9), SMAD7 or KRT14 (Keratin 14). In some embodiments, a nucleic acid or oligonucleotide or other biologically active agent is capable of reducing the level and/or activity of a mutant form of any of: dystrophin, myostatin, Huntingtin, a myostatin receptor, ActRIIB, ActRIIA, DMPK, Malat1, SMN2, dystrophia myotonica protein kinase (DMPK), Proprotein convertase subtilisin/kexin type 9 (PCSK9), SMAD7 or KRT14 (Keratin 14). In some embodiments, a nucleic acid or oligonucleotide or other biologically active agent is capable of increasing the level and/or activity of a wild-type and/or functional form of any of: dystrophin, myostatin, Huntingtin, a myostatin receptor, ActRIIB, ActRIIA, DMPK, Malat1, SMN2, dystrophia myotonica protein kinase (DMPK), Proprotein convertase subtilisin/kexin type 9 (PCSK9), SMAD7 or KRT14 (Keratin 14).

[0555] In some embodiments, stereochemistry at one or more chiral internucleotidic linkages are the same (chirally controlled). In some embodiments, two or more chiral internucleotidic linkages are chirally controlled. In some embodiments, three or more chiral internucleotidic linkages are chirally controlled. In some embodiments, four or more chiral internucleotidic linkages are chirally controlled. In some embodiments, five or more chiral internucleotidic linkages are chirally controlled. In some embodiments, six or more chiral internucleotidic linkages are chirally controlled. In some embodiments, seven or more chiral internucleotidic linkages are chirally controlled. In some embodiments, eight or more chiral internucleotidic linkages are chirally controlled. In some embodiments, nine or more chiral internucleotidic linkages are chirally controlled. In some embodiments, ten or more chiral internucleotidic linkages are chirally controlled. In some embodiments, 11 or more chiral internucleotidic linkages are chirally controlled. In some embodiments, 12 or more chiral internucleotidic linkages are chirally controlled. In some embodiments, 13 or more chiral internucleotidic linkages are chirally controlled. In some embodiments, 14 or more chiral internucleotidic linkages are chirally controlled. In some embodiments, 15 or more chiral internucleotidic linkages are chirally controlled. In some embodiments, 16 or more chiral internucleotidic linkages are chirally controlled. In some embodiments, 17 or more chiral internucleotidic linkages are chirally controlled. In some embodiments, 18 or more chiral internucleotidic linkages are chirally controlled. In some embodiments, 19 or more chiral internucleotidic linkages are chirally controlled. In some embodiments, 20 or more chiral internucleotidic linkages are chirally controlled. In some embodiments, 21 or more chiral internucleotidic linkages are chirally controlled. In some embodiments, 22 or more chiral internucleotidic linkages are chirally controlled. In some embodiments, 23 or more chiral internucleotidic linkages are chirally controlled. In some embodiments, 24 or more chiral internucleotidic linkages are chirally controlled. In some embodiments, 25 or more chiral internucleotidic linkages are chirally controlled. In some embodiments, 26 or more chiral internucleotidic linkages are chirally controlled. In some embodiments, 27 or more chiral internucleotidic linkages are chirally controlled. In some embodiments, 28 or more chiral internucleotidic linkages are chirally controlled. In some embodiments, 29 or more chiral internucleotidic linkages are chirally controlled. In some embodiments, 30 or more chiral internucleotidic linkages are chirally controlled. In some embodiments, each chiral internucleotidic linkage is chirally controlled, and oligonucleotides share a common pattern of backbone chiral centers.

[0556] In some embodiments, not all chiral internucleotidic linkages are chirally controlled, and a chirally controlled oligonucleotide composition is a partially chirally controlled oligonucleotide composition. In some embodiments, all chiral internucleotidic linkage are chirally controlled, and a chirally controlled oligonucleotide composition is a complete chirally controlled oligonucleotide composition.

[0557] In some embodiments, a chiral internucleoside linkage is a phosphorothioate. In some embodiments, a phosphorothioate can exist in a Rp or Sp conformation. Various other internucleotidic linkages, which can be chiral, are described herein.

[0558] In some embodiments, an oligonucleotide is an oligonucleotide described in Patent Application Publications US20120316224, US20140194610, US20150211006, and WO2015107425, the oligonucleotides and oligonucleotide compositions of each of which are incorporated herein by reference.

[0559] In some embodiments, the sequence of the oligonucleotide in the oligonucleotide composition comprises or consists of the sequence of any oligonucleotide described herein. In some embodiments, the sequence of the oligonucleotide in the oligonucleotide composition comprises or consists of the sequence of any oligonucleotide listed in Table 4A. In some embodiments, the oligonucleotide in the oligonucleotide composition is a splice-switching oligonucleotide. In some embodiments, the oligonucleotide in the oligonucleotide composition is capable of skipping or mediating skipping of an exon in the dystrophin gene. In some embodiments, the oligonucleotide in the oligonucleotide composition is a splice-switching oligonucleotide. In some embodiments, the oligonucleotide in the oligonucleotide composition is capable of skipping or mediating skipping of exon 51 in the dystrophin gene. In some embodiments, a biologically active agent comprises or consists of or is an oligonucleotide or oligonucleotide composition or chirally controlled oligonucleotide composition, wherein the sequence of the oligonucleotide comprises or consists of the sequence of an oligonucleotide capable of skipping or mediating skipping of exon 51, 45, 53 or 44 in the dystrophin gene. In some embodiments, the sequence of the oligonucleotide in the oligonucleotide composition comprises or consists of the sequence of WV-887, WV-896, WV-1709, WV-1710, WV-1714, WV-2095, WV-2100, WV-2106, WV-2107, WV-2108, WV-2109, WV-2223, WV-2224, WV-2225, WV-2226, WV-2227, WV-2228, WV-2229, WV-2230, WV-2438, WV-2444, WV-2445, WV-2526, WV-2527, WV-2528, WV-2529, WV-2530, WV-2531, WV-2533, WV-2578, WV-2580, WV-2587, WV-3047, WV-3152, WV-3472, WV-3473, WV-3507, WV-3508, WV-3509, WV-3510, WV-3511, WV-3512, WV-3513, WV-3514, WV-3515, WV-3545, or WV-3546.

[0560] In some embodiments, structural elements of an oligonucleotide includes any one or more of: base sequence (including length), pattern of chemical modifications to sugar and base moieties, pattern of backbone linkages (e.g., pattern of natural phosphate linkages, phosphorothioate linkages, phosphorothioate triester linkages, and combinations thereof), pattern of backbone chiral centers (e.g., pattern of stereochemistry (Rp/Sp) of chiral internucleotidic linkages), and pattern of backbone phosphorus modifications (e.g., pattern of modifications on the internucleotidic phosphorus atom, such as —S—, and -L-R¹ of formula I). In some embodiments, structural elements include lipid moieties and/or targeting components, for example, as moieties connected to sugars, bases, and/or internucleotidic linkages. In some embodiments, a structural element is base sequence. In some embodiments, a structural element is pattern of chemical modifications. In some embodiments, a structural element is pattern of sugar modifications. In some embodiments, a structural element is nucleobase modifications. In some embodiments, a structural element is pattern of lipid moieties. In some embodiments, a structural element is pattern of targeting component. In some embodiments, a structural element is a linker connecting a biologically active agent, e.g., a provided oligonucleotide, and a lipid moiety and/or a targeting component. In some embodiments, a structural element is pattern of backbone linkages. In some embodiments, a structural element is pattern of backbone chiral centers. In some embodiments, a structural element is pattern of backbone phosphorus modifications. In some embodiments, an oligonucleotide or oligonucleotide composition of any structural elements of any oligonucleotide listed herein can be used in combination with any composition and/or method described herein, including, but not limited to, any combination with any lipid described herein, any additional component described herein, or any other composition (or component thereof) or method described herein. In some embodiments, structural elements of provided oligonucleotides comprise or consist of one or more structural elements of any oligonucleotides described herein. In some embodiments, structural elements of provided oligonucleotides comprise or consist of one or more structural elements of any oligonucleotides listed in Table 4A. In some embodiments, a provided oligonucleotide in a provided oligonucleotide composition is a splice-switching oligonucleotide. In some embodiments, a provided oligonucleotide in a provided oligonucleotide composition is capable of skipping or mediating skipping of an exon in the dystrophin gene. In some embodiments, a provided oligonucleotide in a provided oligonucleotide composition is a splice-switching oligonucleotide. In some embodiments, a provided oligonucleotide in a provided oligonucleotide composition is capable of skipping or mediating skipping of exon 51 in the dystrophin gene. In some embodiments, a biologically active agent comprises or consists of or is a provided oligonucleotide, wherein structural elements of the oligonucleotide comprises or consists of one or more structural elements of an oligonucleotide capable of skipping or mediating skipping of exon 51, 45, 53 or 44 in the dystrophin gene. In some embodiments, one or more structural elements of provided oligonucleotides comprise or consist of one or more structural elements of WV-887, WV-896, WV-1709, WV-1710, WV-1714, WV-2095, WV-2100, WV-2106, WV-2107, WV-2108, WV-2109, WV-2223, WV-2224, WV-2225, WV-2226, WV-2227, WV-2228, WV-2229, WV-2230, WV-2438, WV-2444, WV-2445, WV-2526, WV-2527, WV-2528, WV-2529, WV-2530, WV-2531, WV-2533, WV-2578, WV-2580, WV-2587, WV-3047, WV-3152, WV-3472, WV-3473, WV-3507, WV-3508, WV-3509, WV-3510, WV-3511, WV-3512, WV-3513, WV-3514, WV-3515, WV-3545, or WV-3546. For example, in some embodiments, a structural element is base sequence comprising or consisting of the base sequence of WV-887; in some embodiments, a structural element is pattern of chemical modifications comprising or consisting of that of WV-887; in some embodiments, a structural element is pattern of sugar modifications comprising or consisting of that of WV-887; in some embodiments, a structural element is nucleobase modifications comprising or consisting of that of WV-887; in some embodiments, a structural element is pattern of lipid moieties comprising or consisting of that of WV-3546; in some embodiments, a structural element is pattern of targeting component comprising or consisting of that of WV-3548; in some embodiments, a structural element is a linker comprising or consisting of that of WV-3548; in some embodiments, a structural element is pattern of backbone linkages comprising or consisting of that of WV-887; in some embodiments, a structural element is pattern of backbone chiral centers comprising or consisting of that of WV-887; in some embodiments, a structural element is pattern of backbone phosphorus modifications comprising of consisting of that of WV-887. In some embodiments, the present disclosure provides a chirally controlled oligonucleotide composition, wherein one or more of the structural elements of the oligonucleotide comprise one or more structural elements of WV-2444.

[0561] In some embodiments, the present disclosure provides a chirally controlled oligonucleotide composition, wherein one or more of the structural elements of the oligonucleotide comprise one or more structural elements of WV-2445.

[0562] In some embodiments, the present disclosure provides a chirally controlled oligonucleotide composition, wherein one or more of the structural elements of the oligonucleotide comprise one or more structural elements of WV-2526.

[0563] In some embodiments, the present disclosure provides a chirally controlled oligonucleotide composition, wherein one or more of the structural elements of the oligonucleotide comprise one or more structural elements of WV-2527.

[0564] In some embodiments, the present disclosure provides a chirally controlled oligonucleotide composition, wherein one or more of the structural elements of the oligonucleotide comprise one or more structural elements of WV-2528.

[0565] In some embodiments, the present disclosure provides a chirally controlled oligonucleotide composition, wherein one or more of the structural elements of the oligonucleotide comprise one or more structural elements of WV-2530.

[0566] In some embodiments, the present disclosure provides a chirally controlled oligonucleotide composition, wherein one or more of the structural elements of the oligonucleotide comprise one or more structural elements of WV-2531.

[0567] In some embodiments, the present disclosure provides a chirally controlled oligonucleotide composition, wherein one or more of the structural elements of the oligonucleotide comprise one or more structural elements of WV-2578.

[0568] In some embodiments, the present disclosure provides a chirally controlled oligonucleotide composition, wherein one or more of the structural elements of the oligonucleotide comprise one or more structural elements of WV-2580.

[0569] In some embodiments, the present disclosure provides a chirally controlled oligonucleotide composition, wherein one or more of the structural elements of the oligonucleotide comprise one or more structural elements of WV-2587.

[0570] In some embodiments, the present disclosure provides a chirally controlled oligonucleotide composition, wherein one or more of the structural elements of the oligonucleotide comprise one or more structural elements of WV-3047.

[0571] In some embodiments, the present disclosure provides a chirally controlled oligonucleotide composition, wherein one or more of the structural elements of the oligonucleotide comprise one or more structural elements of WV-3152.

[0572] In some embodiments, the present disclosure provides a chirally controlled oligonucleotide composition, wherein one or more of the structural elements of the oligonucleotide comprise one or more structural elements of WV-3472.

[0573] In some embodiments, the present disclosure provides a chirally controlled oligonucleotide composition, wherein one or more of the structural elements of the oligonucleotide comprise one or more structural elements of WV-3473.

[0574] In some embodiments, the present disclosure provides a chirally controlled oligonucleotide composition, wherein one or more of the structural elements of the oligonucleotide comprise one or more structural elements of WV-3507.

[0575] In some embodiments, the present disclosure provides a chirally controlled oligonucleotide composition, wherein one or more of the structural elements of the oligonucleotide comprise one or more structural elements of WV-3508.

[0576] In some embodiments, the present disclosure provides a chirally controlled oligonucleotide composition, wherein one or more of the structural elements of the oligonucleotide comprise one or more structural elements of WV-3509.

[0577] In some embodiments, the present disclosure provides a chirally controlled oligonucleotide composition, wherein one or more of the structural elements of the oligonucleotide comprise one or more structural elements of WV-3510.

[0578] In some embodiments, the present disclosure provides a chirally controlled oligonucleotide composition, wherein one or more of the structural elements of the oligonucleotide comprise one or more structural elements of WV-3511.

[0579] In some embodiments, the present disclosure provides a chirally controlled oligonucleotide composition, wherein one or more of the structural elements of the oligonucleotide comprise one or more structural elements of WV-3512.

[0580] In some embodiments, the present disclosure provides a chirally controlled oligonucleotide composition, wherein one or more of the structural elements of the oligonucleotide comprise one or more structural elements of WV-3513.

[0581] In some embodiments, the present disclosure provides a chirally controlled oligonucleotide composition, wherein one or more of the structural elements of the oligonucleotide comprise one or more structural elements of WV-3514.

[0582] In some embodiments, the present disclosure provides a chirally controlled oligonucleotide composition, wherein one or more of the structural elements of the oligonucleotide comprise one or more structural elements of WV-3515.

[0583] In some embodiments, the present disclosure provides a chirally controlled oligonucleotide composition, wherein one or more of the structural elements of the oligonucleotide comprise one or more structural elements of WV-3545.

[0584] In some embodiments, the present disclosure provides a chirally controlled oligonucleotide composition, wherein one or more of the structural elements of the oligonucleotide comprise one or more structural elements of WV-3546.

[0585] In some embodiments, the present disclosure provides a chirally controlled oligonucleotide composition, wherein one or more of the structural elements of the oligonucleotide consist of one or more structural elements of WV-2444.

[0586] In some embodiments, the present disclosure provides a chirally controlled oligonucleotide composition, wherein one or more of the structural elements of the oligonucleotide consist of one or more structural elements of WV-2445.

[0587] In some embodiments, the present disclosure provides a chirally controlled oligonucleotide composition, wherein one or more of the structural elements of the oligonucleotide consist of one or more structural elements of WV-2526.

[0588] In some embodiments, the present disclosure provides a chirally controlled oligonucleotide composition, wherein one or more of the structural elements of the oligonucleotide consist of one or more structural elements of WV-2527.

[0589] In some embodiments, the present disclosure provides a chirally controlled oligonucleotide composition, wherein one or more of the structural elements of the oligonucleotide consist of one or more structural elements of WV-2528.

[0590] In some embodiments, the present disclosure provides a chirally controlled oligonucleotide composition, wherein one or more of the structural elements of the oligonucleotide consist of one or more structural elements of WV-2530.

[0591] In some embodiments, the present disclosure provides a chirally controlled oligonucleotide composition, wherein one or more of the structural elements of the oligonucleotide consist of one or more structural elements of WV-2531.

[0592] In some embodiments, the present disclosure provides a chirally controlled oligonucleotide composition, wherein one or more of the structural elements of the oligonucleotide consist of one or more structural elements of WV-2578.

[0593] In some embodiments, the present disclosure provides a chirally controlled oligonucleotide composition, wherein one or more of the structural elements of the oligonucleotide consist of one or more structural elements of WV-2580.

[0594] In some embodiments, the present disclosure provides a chirally controlled oligonucleotide composition, wherein one or more of the structural elements of the oligonucleotide consist of one or more structural elements of WV-2587.

[0595] In some embodiments, the present disclosure provides a chirally controlled oligonucleotide composition, wherein one or more of the structural elements of the oligonucleotide consist of one or more structural elements of WV-3047.

[0596] In some embodiments, the present disclosure provides a chirally controlled oligonucleotide composition, wherein one or more of the structural elements of the oligonucleotide consist of one or more structural elements of WV-3152.

[0597] In some embodiments, the present disclosure provides a chirally controlled oligonucleotide composition, wherein one or more of the structural elements of the oligonucleotide consist of one or more structural elements of WV-3472.

[0598] In some embodiments, the present disclosure provides a chirally controlled oligonucleotide composition, wherein one or more of the structural elements of the oligonucleotide consist of one or more structural elements of WV-3473.

[0599] In some embodiments, the present disclosure provides a chirally controlled oligonucleotide composition, wherein one or more of the structural elements of the oligonucleotide consist of one or more structural elements of WV-3507.

[0600] In some embodiments, the present disclosure provides a chirally controlled oligonucleotide composition, wherein one or more of the structural elements of the oligonucleotide consist of one or more structural elements of WV-3508.

[0601] In some embodiments, the present disclosure provides a chirally controlled oligonucleotide composition, wherein one or more of the structural elements of the oligonucleotide consist of one or more structural elements of WV-3509.

[0602] In some embodiments, the present disclosure provides a chirally controlled oligonucleotide composition, wherein one or more of the structural elements of the oligonucleotide consist of one or more structural elements of WV-3510.

[0603] In some embodiments, the present disclosure provides a chirally controlled oligonucleotide composition, wherein one or more of the structural elements of the oligonucleotide consist of one or more structural elements of WV-3511.

[0604] In some embodiments, the present disclosure provides a chirally controlled oligonucleotide composition, wherein one or more of the structural elements of the oligonucleotide consist of one or more structural elements of WV-3512.

[0605] In some embodiments, the present disclosure provides a chirally controlled oligonucleotide composition, wherein one or more of the structural elements of the oligonucleotide consist of one or more structural elements of WV-3513.

[0606] In some embodiments, the present disclosure provides a chirally controlled oligonucleotide composition, wherein one or more of the structural elements of the oligonucleotide consist of one or more structural elements of WV-3514.

[0607] In some embodiments, the present disclosure provides a chirally controlled oligonucleotide composition, wherein one or more of the structural elements of the oligonucleotide consist of one or more structural elements of WV-3515.

[0608] In some embodiments, the present disclosure provides a chirally controlled oligonucleotide composition, wherein one or more of the structural elements of the oligonucleotide consist of one or more structural elements of WV-3545.

[0609] In some embodiments, the present disclosure provides a chirally controlled oligonucleotide composition, wherein one or more of the structural elements of the oligonucleotide consist of one or more structural elements of WV-3546.

[0610] In some embodiments, the present disclosure provides a chirally controlled oligonucleotide composition, wherein one or more of the structural elements of the oligonucleotide comprise or consist of one or more structural elements of WV-2444, wherein the composition further comprises a lipid.

[0611] In some embodiments, the present disclosure provides a chirally controlled oligonucleotide composition, wherein one or more of the structural elements of the oligonucleotide comprise or consist of one or more structural elements of WV-2445, wherein the composition further comprises a lipid.

[0612] In some embodiments, the present disclosure provides a chirally controlled oligonucleotide composition, wherein one or more of the structural elements of the oligonucleotide comprise or consist of one or more structural elements of WV-2526, wherein the composition further comprises a lipid.

[0613] In some embodiments, the present disclosure provides a chirally controlled oligonucleotide composition, wherein one or more of the structural elements of the oligonucleotide comprise or consist of one or more structural elements of WV-2527, wherein the composition further comprises a lipid.

[0614] In some embodiments, the present disclosure provides a chirally controlled oligonucleotide composition, wherein one or more of the structural elements of the oligonucleotide comprise or consist of one or more structural elements of WV-2528, wherein the composition further comprises a lipid.

[0615] In some embodiments, the present disclosure provides a chirally controlled oligonucleotide composition, wherein one or more of the structural elements of the oligonucleotide comprise or consist of one or more structural elements of WV-2530, wherein the composition further comprises a lipid.

[0616] In some embodiments, the present disclosure provides a chirally controlled oligonucleotide composition, wherein one or more of the structural elements of the oligonucleotide comprise or consist of one or more structural elements of WV-2531, wherein the composition further comprises a lipid.

[0617] In some embodiments, the present disclosure provides a chirally controlled oligonucleotide composition, wherein one or more of the structural elements of the oligonucleotide comprise or consist of one or more structural elements of WV-2578, wherein the composition further comprises a lipid.

[0618] In some embodiments, the present disclosure provides a chirally controlled oligonucleotide composition, wherein one or more of the structural elements of the oligonucleotide comprise or consist of one or more structural elements of WV-2580, wherein the composition further comprises a lipid.

[0619] In some embodiments, the present disclosure provides a chirally controlled oligonucleotide composition, wherein one or more of the structural elements of the oligonucleotide comprise or consist of one or more structural elements of WV-2587, wherein the composition further comprises a lipid.

[0620] In some embodiments, the present disclosure provides a chirally controlled oligonucleotide composition, wherein one or more of the structural elements of the oligonucleotide comprise or consist of one or more structural elements of WV-3047, wherein the composition further comprises a lipid.

[0621] In some embodiments, the present disclosure provides a chirally controlled oligonucleotide composition, wherein one or more of the structural elements of the oligonucleotide comprise or consist of one or more structural elements of WV-3152, wherein the composition further comprises a lipid.

[0622] In some embodiments, the present disclosure provides a chirally controlled oligonucleotide composition, wherein one or more of the structural elements of the oligonucleotide comprise or consist of one or more structural elements of WV-3472, wherein the composition further comprises a lipid.

[0623] In some embodiments, the present disclosure provides a chirally controlled oligonucleotide composition, wherein one or more of the structural elements of the oligonucleotide comprise or consist of one or more structural elements of WV-3473, wherein the composition further comprises a lipid.

[0624] In some embodiments, the present disclosure provides a chirally controlled oligonucleotide composition, wherein one or more of the structural elements of the oligonucleotide comprise or consist of one or more structural elements of WV-3507, wherein the composition further comprises a lipid.

[0625] In some embodiments, the present disclosure provides a chirally controlled oligonucleotide composition, wherein one or more of the structural elements of the oligonucleotide comprise or consist of one or more structural elements of WV-3508, wherein the composition further comprises a lipid.

[0626] In some embodiments, the present disclosure provides a chirally controlled oligonucleotide composition, wherein one or more of the structural elements of the oligonucleotide comprise or consist of one or more structural elements of WV-3509, wherein the composition further comprises a lipid.

[0627] In some embodiments, the present disclosure provides a chirally controlled oligonucleotide composition, wherein one or more of the structural elements of the oligonucleotide comprise or consist of one or more structural elements of WV-3510, wherein the composition further comprises a lipid.

[0628] In some embodiments, the present disclosure provides a chirally controlled oligonucleotide composition, wherein one or more of the structural elements of the oligonucleotide comprise or consist of one or more structural elements of WV-3511, wherein the composition further comprises a lipid.

[0629] In some embodiments, the present disclosure provides a chirally controlled oligonucleotide composition, wherein one or more of the structural elements of the oligonucleotide comprise or consist of one or more structural elements of WV-3512, wherein the composition further comprises a lipid.

[0630] In some embodiments, the present disclosure provides a chirally controlled oligonucleotide composition, wherein one or more of the structural elements of the oligonucleotide comprise or consist of one or more structural elements of WV-3513, wherein the composition further comprises a lipid.

[0631] In some embodiments, the present disclosure provides a chirally controlled oligonucleotide composition, wherein one or more of the structural elements of the oligonucleotide comprise or consist of one or more structural elements of WV-3514, wherein the composition further comprises a lipid.

[0632] In some embodiments, the present disclosure provides a chirally controlled oligonucleotide composition, wherein one or more of the structural elements of the oligonucleotide comprise or consist of one or more structural elements of WV-3515, wherein the composition further comprises a lipid.

[0633] In some embodiments, the present disclosure provides chirally controlled oligonucleotide compositions of WV-887, WV-892, WV-896, WV-1714, WV-2444, WV-2445, WV-2526, WV-2527, WV-2528, WV-2530, WV-2531, WV-2578, WV-2580, WV-2587, WV-3047, WV-3152, WV-3472, WV-3473, WV-3507, WV-3508, WV-3509, WV-3510, WV-3511, WV-3512, WV-3513, WV-3514, WV-3515, WV-3545, or WV-3546. In some embodiments, the present disclosure provides a chirally controlled oligonucleotide composition of WV-887. In some embodiments, the present disclosure provides a chirally controlled oligonucleotide composition of WV-892. In some embodiments, the present disclosure provides a chirally controlled oligonucleotide composition of WV-896. In some embodiments, the present disclosure provides a chirally controlled oligonucleotide composition of WV-1714. In some embodiments, the present disclosure provides a chirally controlled oligonucleotide composition of WV-2444. In some embodiments, the present disclosure provides a chirally controlled oligonucleotide composition of WV-2445. In some embodiments, the present disclosure provides a chirally controlled oligonucleotide composition of WV-2526. In some embodiments, the present disclosure provides a chirally controlled oligonucleotide composition of WV-2527. In some embodiments, the present disclosure provides a chirally controlled oligonucleotide composition of WV-2528. In some embodiments, the present disclosure provides a chirally controlled oligonucleotide composition of WV-2530. In some embodiments, the present disclosure provides a chirally controlled oligonucleotide composition of WV-2531. In some embodiments, the present disclosure provides a chirally controlled oligonucleotide composition of WV-2578. In some embodiments, the present disclosure provides a chirally controlled oligonucleotide composition of WV-2580. In some embodiments, the present disclosure provides a chirally controlled oligonucleotide composition of WV-2587. In some embodiments, the present disclosure provides a chirally controlled oligonucleotide composition of WV-3047. In some embodiments, the present disclosure provides a chirally controlled oligonucleotide composition of WV-3152. In some embodiments, the present disclosure provides a chirally controlled oligonucleotide composition of WV-3472. In some embodiments, the present disclosure provides a chirally controlled oligonucleotide composition of WV-3473. In some embodiments, the present disclosure provides a chirally controlled oligonucleotide composition of WV-3507. In some embodiments, the present disclosure provides a chirally controlled oligonucleotide composition of WV-3508. In some embodiments, the present disclosure provides a chirally controlled oligonucleotide composition of WV-3509. In some embodiments, the present disclosure provides a chirally controlled oligonucleotide composition of WV-3510. In some embodiments, the present disclosure provides a chirally controlled oligonucleotide composition of WV-3511. In some embodiments, the present disclosure provides a chirally controlled oligonucleotide composition of WV-3512. In some embodiments, the present disclosure provides a chirally controlled oligonucleotide composition of WV-3513. In some embodiments, the present disclosure provides a chirally controlled oligonucleotide composition of WV-3514. In some embodiments, the present disclosure provides a chirally controlled oligonucleotide composition of WV-3515. In some embodiments, the present disclosure provides a chirally controlled oligonucleotide composition of WV-3545. In some embodiments, the present disclosure provides a chirally controlled oligonucleotide composition of WV-3546. As readily appreciated by one skilled in the art, such chirally controlled oligonucleotide compositions comprise predetermined levels of WV-887, WV-892, WV-896, WV-1714, WV-2444, WV-2445, WV-2526, WV-2527, WV-2528, WV-2530, WV-2531, WV-2578, WV-2580, WV-2587, WV-3047, WV-3152, WV-3472, WV-3473, WV-3507, WV-3508, WV-3509, WV-3510, WV-3511, WV-3512, WV-3513, WV-3514, WV-3515, WV-3545, or WV-3546.

[0634] In some embodiments, a lipid is a fatty acid. In some embodiments, an oligonucleotide is conjugated to a fatty acid. In some embodiments, a fatty acid comprises 10, 11, 12, 13, 14, 15, 16, 17, 18, 19, 20, 21, 22, 23, 24, 25, 26, 27, 28, 29, 30 or more carbon atoms. In some embodiments, a fatty acid comprises 10 or more carbon atoms. In some embodiments, a fatty acid comprises 11 or more carbon atoms. In some embodiments, a fatty acid comprises 12 or more carbon atoms. In some embodiments, a fatty acid comprises 13 or more carbon atoms. In some embodiments, a fatty acid comprises 14 or more carbon atoms. In some embodiments, a fatty acid comprises 15 or more carbon atoms. In some embodiments, a fatty acid comprises 16 or more carbon atoms. In some embodiments, a fatty acid comprises 17 or more carbon atoms. In some embodiments, a fatty acid comprises 18 or more carbon atoms. In some embodiments, a fatty acid comprises 19 or more carbon atoms. In some embodiments, a fatty acid comprises 20 or more carbon atoms. In some embodiments, a fatty acid comprises 21 or more carbon atoms. In some embodiments, a fatty acid comprises 22 or more carbon atoms. In some embodiments, a fatty acid comprises 23 or more carbon atoms. In some embodiments, a fatty acid comprises 24 or more carbon atoms. In some embodiments, a fatty acid comprises 25 or more carbon atoms. In some embodiments, a fatty acid comprises 26 or more carbon atoms. In some embodiments, a fatty acid comprises 27 or more carbon atoms. In some embodiments, a fatty acid comprises 28 or more carbon atoms. In some embodiments, a fatty acid comprises 29 or more carbon atoms. In some embodiments, a fatty acid comprises 30 or more carbon atoms.

[0635] In some embodiments, a lipid is stearic acid or turbinaric acid. In some embodiments, a lipid is stearic acid. In some embodiments, a lipid is turbinaric acid.

[0636] In some embodiments, a provided oligonucleotide is no more than 25 bases long. In some embodiments, a provided oligonucleotide is no more than 30 bases long. In some embodiments, a provided oligonucleotide is no more than 35 bases long. In some embodiments, a provided oligonucleotide is no more than 40 bases long. In some embodiments, a provided oligonucleotide is no more than 45 bases long. In some embodiments, a provided oligonucleotide is no more than 50 bases long. In some embodiments, a provided oligonucleotide is no more than 55 bases long. In some embodiments, the oligonucleotide is no more than 60 bases long.

[0637] In some embodiments, an oligonucleotide comprises one or more chiral internucleotidic linkages. In some embodiments, for oligonucleotides comprising one or more chiral internucleotidic linkages, a provided composition is a stereorandom composition of such oligonucleotides in that stereochemistry of each of the chiral internucleotidic linkages is not controlled. In some embodiments, a stereorandom composition is prepared by oligonucleotide synthesis without dedicated efforts e.g., through chiral auxiliaries, etc. to control the stereochemistry of each chiral internucleotidic linkages. In some embodiments, for oligonucleotides comprising one or more chiral internucleotidic linkages, a provided composition is a chirally controlled oligonucleotide composition of such oligonucleotides in that stereochemistry of at least one of the chiral internucleotidic linkages is controlled. In some embodiments, stereochemistry of each of the chiral internucleotidic linkages is independently controlled, and a provided composition is a completely chirally controlled oligonucleotide composition. In some embodiments, stereochemistry of one or more chiral internucleotidic linkages is controlled (chiral controlled internucleotidic linkages) while stereochemistry of one or more chiral internucleotidic linkages is not controlled (stereorandom/non-chirally controlled internucleotidic linkages), and a provided composition is a partially chirally controlled oligonucleotide composition. In some embodiments, a chirally controlled oligonucleotide composition can be prepared by oligonucleotide synthesis comprising stereoselective formation of one or more or all chiral internucleotidic linkages using, for example, technologies described in Patent Application Publications US20120316224, US20140194610, US20150211006, and WO2015107425, the technologies of each of which are incorporated herein by reference. In some embodiments, a provided composition comprises a chirally controlled oligonucleotide composition described in Patent Application Publications US20120316224, US20140194610, US20150211006, and WO2015107425, the chirally controlled oligonucleotide compositions of each of which are incorporated herein by reference, and a lipid. In some embodiments, a lipid is conjugated to oligonucleotides comprising stereochemically controlled internucleotidic linkages.

[0638] In some embodiments, the present disclosure provides an oligonucleotide composition comprising a lipid, and a first plurality of oligonucleotides which have a common base sequence, and comprise one or more modified sugar moieties, one or more natural phosphate linkages, or combinations thereof. In some embodiments, the present disclosure provides a lipid, and an oligonucleotide composition comprising a first plurality of oligonucleotides which have a common base sequence, comprise one or more modified internucleotidic linkages, and comprise one or more modified sugar moieties, one or more natural phosphate linkages, or combinations thereof. In some embodiments, oligonucleotides of a first plurality have a wing-core-wing structure. In some embodiments, each wing region independently comprises one or more natural phosphate linkages and optionally one or more modified internucleotidic linkages, and the core comprises one or more modified internucleotidic linkages and optionally one or more natural phosphate linkages. In some embodiments, each wing region independently comprises one or more natural phosphate linkages and one or more modified internucleotidic linkages, and the core comprises one or more modified internucleotidic linkages and no natural phosphate linkages. In some embodiments, a wing comprises modified sugar moieties. In some embodiments, a modified internucleotidic linkage is phosphorothioate. In some embodiments, a modified internucleotidic linkage is substituted phosphorothioate. In some embodiments, a modified internucleotidic linkage has the structure of formula I described in this disclosure. In some embodiments, a modified sugar moiety is 2′-modified. In some embodiments, a 2′-modification is 2′-OR¹. In some embodiments, a 2′-modification is 2′-R¹.

[0639] In some embodiments, a wing comprises at least 3 2′-F modifications. In some embodiments, a wing comprises at least 4 2′-F modifications. In some embodiments, a wing comprises at least 5 2′-F modifications. In some embodiments, a wing comprises at least 6 2′-F modifications. In some embodiments, a core comprising any two or more of: a 2′-F modification, a 2′-OMe modification, or 2′-OH. In some embodiments, a core comprises at least 1 2′-OMe modification. In some embodiments, a core comprises at least 2 2′-OMe modifications. In some embodiments, a core comprises at least 3 2′-OMe modifications. In some embodiments, a core comprises at least 2 2′-OMe modifications. In some embodiments, a core comprises at least 4 2′-OMe modifications. In some embodiments, a core comprises at least 1 2′-F modification. In some embodiments, a core comprises at least 2 2′-F modifications. In some embodiments, a core comprises at least 3 2′-F modifications. In some embodiments, a core comprises at least 2 2′-F modifications. In some embodiments, a core comprises at least 4 2′-F modifications. In some embodiments, a core comprises at least 1 2′-F modification and at least 1 2′-OMe modification. In some embodiments, a core comprises at least 1 2′-F modification and at least 2 2′-OMe modifications. In some embodiments, a core comprises at least 2 2′-F modifications and at least 1 2′-OMe modification. In some embodiments, a core comprises at least 2 2′-F modifications and at least 2 2′-OMe modifications. In some embodiments, the 2′-F modifications in the core and/or wing are contiguous or non-contiguous. In some embodiments, the 2′-OMe modifications in the core and/or wing are contiguous or non-contiguous. In some embodiments, the 2′-OH in the core and/or wing are contiguous or non-contiguous.

[0640] In some embodiments, each wing comprises at least one chiral internucleotidic linkage and at least one natural phosphate linkage. In some embodiments, each wing comprises at least one modified sugar moiety. In some embodiments, each wing sugar moiety is modified. In some embodiments, a wing sugar moiety is modified by a modification that is absent from the core region. In some embodiments, a wing region only has modified internucleotidic linkages at one or both of its ends. In some embodiments, a wing region only has a modified internucleotidic linkage at its 5′-end. In some embodiments, a wing region only has a modified internucleotidic linkage at its 3′-end. In some embodiments, a wing region only has modified internucleotidic linkages at its 5′- and 3′-ends. In some embodiments, a wing is to the 5′-end of a core, and the wing only has a modified internucleotidic linkage at its 5′-end. In some embodiments, a wing is to the 5′-end of a core, and the wing only has a modified internucleotidic linkage at its 3′-end. In some embodiments, a wing is to the 5′-end of a core, and the wing only has modified internucleotidic linkages at both its 5′- and 3′-ends. In some embodiments, a wing is to the 3′-end of a core, and the wing only has a modified internucleotidic linkage at its 5′-end. In some embodiments, a wing is to the 3′-end of a core, and the wing only has a modified internucleotidic linkage at its 3′-end. In some embodiments, a wing is to the 3′-end of a core, and the wing only has modified internucleotidic linkages at both its 5′- and 3′-ends.

[0641] In some embodiments, a wing comprises at least 4 phosphorothioates. In some embodiments, a wing comprises at least 5 phosphorothioates. In some embodiments, a wing comprises at least 6 phosphorothioates. In some embodiments, a core comprises at least 2 phosphorothioates. In some embodiments, a core comprises at least 3 phosphorothioates. In some embodiments, a core comprises at least 4 phosphorothioates. In some embodiments, a core comprises at least 5 phosphorothioates. In some embodiments, a core comprises at least 6 phosphorothioates. In some embodiments, a core comprises at least 2 phosphodiesters. In some embodiments, a core comprises at least 3 phosphodiesters. In some embodiments, a core comprises at least 4 phosphodiesters. In some embodiments, a core comprises at least 5 phosphodiesters. In some embodiments, a core comprises at least 6 phosphodiesters. In some embodiments, a core comprises at least 1 phosphodiester and at least 1 phosphorothioate. In some embodiments, a core comprises at least 1 phosphodiesters and at least 2 phosphorothioates. In some embodiments, a core comprises at least 2 phosphodiesters and at least 1 phosphorothioates. In some embodiments, a core comprises at least 2 phosphodiesters and at least 2 phosphorothioates. In some embodiments, a core comprises at least 2 phosphodiesters and at least 3 phosphorothioates. In some embodiments, a core comprises at least 3 phosphodiesters and at least 2 phosphorothioates. In some embodiments, a core comprises at least 3 phosphodiesters and at least 3 phosphorothioates. In some embodiments, the phosphodiesters in the core and/or one or both wings are optionally contiguous or not contiguous. In some embodiments, such provided compositions have lower toxicity. In some embodiments, provided compositions have lower complement activation.

[0642] In some embodiments, a common base sequence hybridizes with a transcript of dystrophin, myostatin, Huntingtin, a myostatin receptor, ActRIIB, ActRIIA, DMPK, Malat1, SMN2, dystrophia myotonica protein kinase (DMPK), Proprotein convertase subtilisin/kexin type 9 (PCSK9), SMAD7 or KRT14 (Keratin 14). In some embodiments, a nucleic acid or oligonucleotide or other biologically active agent is capable of reducing the level and/or activity of a mutant form of any of: dystrophin, myostatin, Huntingtin, a myostatin receptor, ActRIIB, ActRIIA, DMPK, Malat1, SMN2, dystrophia myotonica protein kinase (DMPK), Proprotein convertase subtilisin/kexin type 9 (PCSK9), SMAD7 or KRT14 (Keratin 14). In some embodiments, a nucleic acid or oligonucleotide or other biologically active agent is capable of increasing the level and/or activity of a wild-type and/or functional form of any of: dystrophin, myostatin, Huntingtin, a myostatin receptor, ActRIIB, ActRIIA, DMPK, Malat1, SMN2, dystrophia myotonica protein kinase (DMPK), Proprotein convertase subtilisin/kexin type 9 (PCSK9), SMAD7 or KRT14 (Keratin 14).

[0643] In some embodiments, provided compositions is a chirally controlled oligonucleotide composition comprising a lipid, which is optionally conjufated with oligonucleotides. In some embodiments, a provided oligonucleotide composition comprising a first plurality of oligonucleotides is chirally controlled, and oligonucleotides of the first plurality comprise a combination of 2′-modification of one or more sugar moieties, one or more natural phosphate linkages, and one or more chiral internucleotidic linkages. In some embodiments, a provided oligonucleotide composition comprising a first plurality of oligonucleotides is chirally controlled, and oligonucleotides of the first plurality comprise a combination of 2′-modification of one or more sugar moieties, one or more natural phosphate linkages, one or more chiral internucleotidic linkages, wherein the 5′- and/or the 3′-end internucleotidic linkages are chiral. In some embodiments, both the 5′- and the 3′-end internucleotidic linkages are chiral. In some embodiments, both the 5′- and the 3′-end internucleotidic linkages are chiral and Sp. In some embodiments, a provided oligonucleotide composition comprising a first plurality of oligonucleotides is chirally controlled, and oligonucleotides of the first plurality comprise a combination of 2′-modification of one or more sugar moieties, one or more natural phosphate linkages, one or more chiral internucleotidic linkages, and a stereochemistry pattern of (Rp)n(Sp)m, (Np)t(Rp)n(Sp)m, or (Sp)t(Rp)n(Sp)m, wherein m>2. In some embodiments, a chiral internucleotidic linkage has the structure of formula I. In some embodiments, a chiral internucleotidic linkage is a phosphorothioate linkage. In some embodiments, a chiral internucleotidic linkage is a substituted phosphorothioate linkage. In some embodiments, oligonucleotides of the first plurality are optionally and independently conjugated to a lipid.

[0644] In some embodiments, provided oligonucleotides in provided technologies comprise a wing region and a core region. In some embodiments, provided oligonucleotides have a wing-core-wing structure, wherein the core region comprises one or more sugar moieties and/or internucleotidic linkages not in the wing regions. In some embodiments, provided oligonucleotides have a wing-core-wing structure, wherein the core region comprises one or more sugar moieties and internucleotidic linkages not in the wing regions. In some embodiments, provided oligonucleotides have a wing-core-wing structure, wherein the core region comprises one or more sugar moieties not in the wing regions. In some embodiments, provided oligonucleotides have a wing-core-wing structure, wherein the core region comprises one or more internucleotidic linkages not in the wing regions. In some embodiments, a core region comprises a modified sugar moiety. In some embodiments, each sugar moiety in a core region is modified. Example sugar modifications are widely known in the art including but not limited to those described in this disclosure. In some embodiments, each wing region comprises no modified sugar moieties. In some embodiments, a core region comprises one or more natural phosphate linkages. In some embodiments, each internucleotidic linkage following a core nucleoside is natural phosphate linkage. In some embodiments, a wing comprises one or more modified internucleotidic linkages. In some embodiments, each internucleotidic linkage following a core nucleoside is a modified internucleotidic linkage.

[0645] In some embodiments, provided oligonucleotides are blockmers. In some embodiments, provided oligonucleotide are altmers. In some embodiments, provided oligonucleotides are altmers comprising alternating blocks. In some embodiments, a blockmer or an altmer can be defined by chemical modifications (including presence or absence), e.g., base modifications, sugar modification, internucleotidic linkage modifications, stereochemistry, etc.

[0646] In some embodiments, provided oligonucleotides comprise blocks comprising different internucleotidic linkages. In some embodiments, provided oligonucleotides comprise blocks comprising modified internucleotidic linkages and natural phosphate linkages. In some embodiments, provided oligonucleotides comprise blocks comprising different modified internucleotidic linkages. In some embodiments, provided oligonucleotides comprise alternating blocks comprising different internucleotidic linkages. In some embodiments, provided oligonucleotides comprise alternating blocks comprising modified internucleotidic linkages and natural phosphate linkages. In some embodiments, provided oligonucleotides comprise alternating blocks comprising different modified internucleotidic linkages. In some embodiments, a block comprising modified internucleotidic linkages have pattern of backbone chiral centers as described herein. In some embodiments, each block comprising modified internucleotidic linkages has the same pattern of backbone chiral centers. In some embodiments, blocks comprising modified internucleotidic linkages have different patterns of backbone chiral centers. In some embodiments, blocks comprising modified internucleotidic linkages have different length and/or modifications. In some embodiments, blocks comprising modified internucleotidic linkages have the same length and/or modifications. In some embodiments, blocks comprising modified internucleotidic linkages have the same length. In some embodiments, blocks comprising modified internucleotidic linkages have the same internucleotidic linkages. In some embodiments, provided oligonucleotides comprise a first block at the 5′-end (5′-block), and a second block at the 3′-end (3′-block), each of which independently comprise one or more modified internucleotidic linkages. In some embodiments, each of the 5′- and 3′-blocks independently comprises 2, 3, 4, 5, 6, 7, 8, 9, 10, 11, 12, 13, 14, 15, 16, 17, 18, 19, 20 or more modified internucleotidic linkages. In some embodiments, a 5′-block comprises 4 or more modified internucleotidic linkages. In some embodiments, a 5′-block comprises 5 or more modified internucleotidic linkages. In some embodiments, a 5′-block comprises 6 or more modified internucleotidic linkages. In some embodiments, a 5′-block comprises 7 or more modified internucleotidic linkages. In some embodiments, a 3′-block comprises 4 or more modified internucleotidic linkages. In some embodiments, a 3′-block comprises 5 or more modified internucleotidic linkages. In some embodiments, a 3′-block comprises 6 or more modified internucleotidic linkages. In some embodiments, a 3′-block comprises 7 or more modified internucleotidic linkages. In some embodiments, each of the 5′- and 3′-blocks independently comprises at least 4 modified internucleotidic linkages. In some embodiments, each of the 5′- and 3′-blocks independently comprises at least 5 modified internucleotidic linkages. In some embodiments, each of the 5′- and 3′-blocks independently comprises at least 6 modified internucleotidic linkages. In some embodiments, each of the 5′- and 3′-blocks independently comprises at least 7 modified internucleotidic linkages. In some embodiments, modified internucleotidic linkages within a block are consecutive. In some embodiments, each linkage of the 5′-block is independently a modified internucleotidic linkage. In some embodiments, each linkage of the 5′-block is independently a phosphorothioate linkage. In some embodiments, each linkage of the 5′-block is independently chirally controlled. In some embodiments, each linkage of the 5′-block is Sp. In some embodiments, each linkage of the 3′-block is independently a modified internucleotidic linkage. In some embodiments, each linkage of the 3′-block is independently a phosphorothioate linkage. In some embodiments, each linkage of the 3′-block is independently chirally controlled. In some embodiments, each linkage of the 3′-block is Sp.

[0647] In some embodiments, provided oligonucleotides comprise blocks comprising sugar modifications. In some embodiments, provided oligonucleotides comprise one or more blocks comprising one or more 2′-F modifications (2′-F blocks). In some embodiments, provided oligonucleotides comprise blocks comprising consecutive 2′-F modifications. In some embodiments, a block comprises 2, 3, 4, 5, 6, 7, 8, 9, 10, 11, 12, 13, 14, 15, 16, 17, 18, 19, 20 or more consecutive 2′-F modifications. In some embodiments, a block comprises 4 or more 2′-F modifications. In some embodiments, a block comprises 5 or more 2′-F modifications. In some embodiments, a block comprises 6 or more 2′-F modifications. In some embodiments, a block comprises 7 or more 2′-F modifications. In some embodiments, provided oligonucleotides comprises one or more blocks comprising one or more 2′-OR¹ modifications (2′-OR¹ blocks). In some embodiments, provided oligonucleotides comprise both 2′-F and 2′-OR¹ blocks. In some embodiments, provided oligonucleotides comprise alternating 2′-F and 2′-OR¹ blocks. In some embodiments, provided oligonucleotides comprise a first 2′-F block at the 5′-end, and a second 2′-F block at the 3′-end, each of which independently comprises 2, 3, 4, 5, 6, 7, 8, 9, 10, 11, 12, 13, 14, 15, 16, 17, 18, 19, 20 or more consecutive 2′-F modifications; in some embodiments, each of which independently comprises 4 or more 2′-F modifications; in some embodiments, each of which independently comprises 5 or more 2′-F modifications; in some embodiments, each of which independently comprises 6 or more 2′-F modifications; in some embodiments, each of which independently comprises 7 or more 2′-F modifications. In some embodiments, provided oligonucleotides comprise a 5′-block wherein each sugar moiety of the 5′-block comprises a 2′-F modification. In some embodiments, provided oligonucleotides comprise a 3′-block wherein each sugar moiety of the 3′-block comprises a 2′-F modification. In some embodiments, such provided oligonucleotides comprise one or more 2′-OR¹ blocks, and optionally one or more 2′-F blocks, between the 5′ and 3′ 2′-F blocks. In some embodiments, such provided oligonucleotides comprise one or more 2′-OR¹ blocks, and one or more 2′-F blocks, between the 5′ and 3′ 2′-F blocks (e.g., WV-3407, WV-3408, etc.).

[0648] In some embodiments, provided oligonucleotides comprise one or more 2′-F modified sugar moieties whose 3′-internucleotidic linkages are modified internucleotidic linkages. In some embodiments, a modified internucleotidic linkage is phosphorothioate. In some embodiments, a modified internucleotidic linkage is chirally controlled and is Rp. In some embodiments, a modified internucleotidic linkage is chirally controlled and is Sp. In some embodiments, provided oligonucleotides comprise one or more 2′-OR¹ modified sugar moieties whose 3′-internucleotidic linkages are natural phosphate linkages.

[0649] In some embodiments, a block is a stereochemistry block. In some embodiments, a block is an Rp block in that each internucleotidic linkage of the block is Rp. In some embodiments, a 5′-block is an Rp block. In some embodiments, a 3′-block is an Rp block. In some embodiments, a block is an Sp block in that each internucleotidic linkage of the block is Sp. In some embodiments, a 5′-block is an Sp block. In some embodiments, a 3′-block is an Sp block. In some embodiments, provided oligonucleotides comprise both Rp and Sp blocks. In some embodiments, provided oligonucleotides comprise one or more Rp but no Sp blocks. In some embodiments, provided oligonucleotides comprise one or more Sp but no Rp blocks. In some embodiments, provided oligonucleotides comprise one or more PO blocks wherein each internucleotidic linkage in a natural phosphate linkage.

[0650] In some embodiments, a 5′-block is an Sp block wherein each sugar moiety comprises a 2′-F modification. In some embodiments, a 5′-block is an Sp block wherein each of internucleotidic linkage is a modified internucleotidic linkage and each sugar moiety comprises a 2′-F modification. In some embodiments, a 5′-block is an Sp block wherein each of internucleotidic linkage is a phosphorothioate linkage and each sugar moiety comprises a 2′-F modification. In some embodiments, a 5′-block comprises 4 or more nucleoside units. In some embodiments, a 5′-block comprises 5 or more nucleoside units. In some embodiments, a 5′-block comprises 6 or more nucleoside units. In some embodiments, a 5′-block comprises 7 or more nucleoside units. In some embodiments, a 3′-block is an Sp block wherein each sugar moiety comprises a 2′-F modification. In some embodiments, a 3′-block is an Sp block wherein each of internucleotidic linkage is a modified internucleotidic linkage and each sugar moiety comprises a 2′-F modification. In some embodiments, a 3′-block is an Sp block wherein each of internucleotidic linkage is a phosphorothioate linkage and each sugar moiety comprises a 2′-F modification. In some embodiments, a 3′-block comprises 4 or more nucleoside units. In some embodiments, a 3′-block comprises 5 or more nucleoside units. In some embodiments, a 3′-block comprises 6 or more nucleoside units. In some embodiments, a 3′-block comprises 7 or more nucleoside units.

[0651] In some embodiments, a type of nucleoside in a region or an oligonucleotide is followed by a specific type of internucleotidic linkage, e.g., natural phosphate linkage, modified internucleotidic linkage, Rp chiral internucleotidic linkage, Sp chiral internucleotidic linkage, etc. In some embodiments, A is followed by Sp. In some embodiments, A is followed by Rp. In some embodiments, A is followed by natural phosphate linkage (PO). In some embodiments, U is followed by Sp. In some embodiments, U is followed by Rp. In some embodiments, U is followed by natural phosphate linkage (PO). In some embodiments, C is followed by Sp. In some embodiments, C is followed by Rp. In some embodiments, C is followed by natural phosphate linkage (PO). In some embodiments, G is followed by Sp. In some embodiments, G is followed by Rp. In some embodiments, G is followed by natural phosphate linkage (PO). In some embodiments, C and U are followed by Sp. In some embodiments, C and U are followed by Rp. In some embodiments, C and U are followed by natural phosphate linkage (PO). In some embodiments, A and G are followed by Sp. In some embodiments, A and G are followed by Rp. In some embodiments, A and G are followed by natural phosphate linkage (PO).

[0652] In some embodiments, provided oligonucleotides comprise alternating blocks comprising modified sugar moieties and unmodified sugar moieties. In some embodiments, modified sugar moieties comprise 2′-modifications. In some embodiments, provided oligonucleotides comprise alternating 2′-OMe modified sugar moieties and unmodified sugar moieties. For examples, see WV-1112, WV-1113, etc.

[0653] In some embodiments, provided oligonucleotides comprise alternating blocks comprising different modified sugar moieties and/or unmodified sugar moieties. In some embodiments, provided oligonucleotides comprise alternating blocks comprising different modified sugar moieties and unmodified sugar moieties. In some embodiments, provided oligonucleotides comprise alternating blocks comprising different modified sugar moieties. In some embodiments, provided oligonucleotides comprise alternating blocks comprising different modified sugar moieties, wherein the modified sugar moieties comprise different 2′-modifications. For example, in some embodiments, provided oligonucleotide comprises alternating blocks comprising 2′-OMe and 2′-F, respectively. For examples, see WV-1712, WV1713, WV-1714, etc.

[0654] In some embodiments, a type of nucleoside in a region or an oligonucleotide is modified, optionally with a different modification compared to another type of nucleoside. In some embodiments, a type of nucleoside in a region or an oligonucleotide is modified with a different modification compared to another type of nucleoside. For example, in some embodiments, a pyrimidine nucleoside comprises a 2′-F modification, and a purine nucleoside comprises a 2′-OMe modification. In some other embodiments, a pyrimidine nucleoside comprises a 2′-OMe modification, and a purine nucleoside comprises a 2′-F modification. In some embodiments, G and C has one type of sugar modification, and A and U has another type of sugar modification. In some embodiments, G and C comprises 2′-OMe modification, and A and U comprises 2′-F modification. In some embodiments, G and C comprises 2′-F modification, and A and U comprises 2′-OMe modification.

[0655] In some embodiments, an internucleotidic linkage following an unmodified sugar moiety is a modified internucleotidic linkage. In some embodiments, an internucleotidic linkage after an unmodified sugar moiety is a phosphorothioate linkage. In some embodiments, each internucleotidic linkage after an unmodified sugar moiety is a modified internucleotidic linkage. In some embodiments, each internucleotidic linkage after an unmodified sugar moiety is a phosphorothioate linkage. In some embodiments, an internucleotidic linkage following a modified sugar moiety is a natural phosphate linkage. In some embodiments, each internucleotidic linkage following a modified sugar moiety is a natural phosphate linkage.

[0656] In some embodiments, a provided pattern of backbone chiral centers comprises repeating (Sp)m(Rp)n, (Rp)n(Sp)m, (Np)t(Rp)n(Sp)m, or (Sp)t(Rp)n(Sp)m units. In some embodiments, a repeating unit is (Sp)m(Rp)n. In some embodiments, a repeating unit is SpRp. In some embodiments, a repeating unit is SpSpRp. In some embodiments, a repeating unit is SpRpRp. In some embodiments, a repeating unit is RpRpSp. In some embodiments, a repeating unit is (Rp)n(Sp)m. In some embodiments, a repeating unit is (Np)t(Rp)n(Sp)m. In some embodiments, a repeating unit is (Sp)t(Rp)n(Sp)m.

[0657] In some embodiments, a provided pattern of backbone chiral centers comprises a (Sp)m(Rp)n, (Rp)n(Sp)m, (Np)t(Rp)n(Sp)m, or (Sp)t(Rp)n(Sp)m unit. In some embodiments, a unit is (Sp)m(Rp)n. In some embodiments, a unit is SpRp. In some embodiments, a unit is SpSpRp. In some embodiments, a unit is SpRpRp. In some embodiments, a unit is RpRpSp. In some embodiments, a unit is (Rp)n(Sp)m. In some embodiments, a unit is (Sp)m(Rp)n. In some embodiments, a unit is (Rp)n(Sp)m. In some embodiments, a unit is (Np)t(Rp)n(Sp)m. In some embodiments, a unit is (Sp)t(Rp)n(Sp)m.

[0658] In some embodiments, a provided pattern of backbone chiral centers comprises (Rp/Sp)-(All Rp or All Sp)-(Rp/Sp). In some embodiments, a provided pattern of backbone chiral centers comprises (Rp)-(All Sp)-(Rp). In some embodiments, a provided pattern of backbone chiral centers comprises (Sp)-(All Rp)-(Sp). In some embodiments, a provided pattern of backbone chiral centers comprises (Rp/Sp)-(repeating (Sp)m(Rp)n)-(Rp/Sp). In some embodiments, a provided pattern of backbone chiral centers comprises (Rp/Sp)-(repeating SpSpRp)-(Rp/Sp).

[0659] In some embodiments, a provided pattern of backbone chiral centers is (Rp/Sp)-(All Rp or All Sp)-(Rp/Sp). In some embodiments, a provided pattern of backbone chiral centers is (Sp)-(All Sp)-(Sp). In some embodiments, each chiral internucleotidic linkage is Sp. In some embodiments, a provided pattern of backbone chiral centers is (Rp)-(All Sp)-(Rp). In some embodiments, a provided pattern of backbone chiral centers is (Sp)-(All Rp)-(Sp). In some embodiments, a provided pattern of backbone chiral centers is (Rp/Sp)-(repeating (Sp)m(Rp)n)-(Rp/Sp). In some embodiments, a provided pattern of backbone chiral centers is (Rp/Sp)-(repeating SpSpRp)-(Rp/Sp).

[0660] In some embodiments, the present disclosure provides oligonucleotide compositions having low toxicity. In some embodiments, the present disclosure provides oligonucleotide compositions having improved protein binding profile. In some embodiments, the present disclosure provides oligonucleotide compositions having improved binding to albumin. In some embodiments, provided compositions have low toxicity and improved binding to certain desired proteins. In some embodiments, provided compositions have low toxicity and improved binding to certain desired proteins. In some embodiments, provided oligonucleotide compositions at the same time provides the same level of, or greatly enhanced, stability and/or activities, e.g., better target-cleavage pattern, better target-cleavage efficiency, better target specificity, etc.

[0661] In some embodiments, the present disclosure provides an oligonucleotide composition comprising a lipid and a first plurality of oligonucleotides which:
[0662] 1) have a common base sequence complementary to a target sequence in a transcript; and
[0663] 2) comprise one or more modified sugar moieties and modified internucleotidic linkages; wherein the lipid is optionally conjugated to one or more oligonucleotides of the plurality.

[0664] In some embodiments, a provided oligonucleotide composition is characterized in that, when it is contacted with the transcript in a transcript splicing system, splicing of the transcript is altered relative to that observed under reference conditions selected from the group consisting of absence of a lipid of the composition, absence of the composition, presence of a reference composition, and combinations thereof.

[0665] In some embodiments, a reference condition is absence of lipids in the composition. In some embodiments, a reference condition is absence of the composition. In some embodiments, a reference condition is presence of a reference composition. Example reference compositions comprising a reference plurality of oligonucleotides are extensively described in this disclosure. In some embodiments, oligonucleotides of the reference plurality have a different structural elements (chemical modifications, stereochemistry, etc.) compared with oligonucleotides of the first plurality in a provided composition. In some embodiments, a reference composition is a stereorandom preparation of oligonucleotides having the same chemical modifications. In some embodiments, a reference composition is a mixture of stereoisomers while a provided composition is a chirally controlled oligonucleotide composition of one stereoisomer. In some embodiments, oligonucleotides of the reference plurality have the same base sequence as oligonucleotide of the first plurality in a provided composition. In some embodiments, oligonucleotides of the reference plurality have the same chemical modifications as oligonucleotide of the first plurality in a provided composition. In some embodiments, oligonucleotides of the reference plurality have the same sugar modifications as oligonucleotide of the first plurality in a provided composition. In some embodiments, oligonucleotides of the reference plurality have the same base modifications as oligonucleotide of the first plurality in a provided composition. In some embodiments, oligonucleotides of the reference plurality have the same internucleotidic linkage modifications as oligonucleotide of the first plurality in a provided composition. In some embodiments, oligonucleotides of the reference plurality have the same stereochemistry as oligonucleotide of the first plurality in a provided composition but different chemical modifications, e.g., base modification, sugar modification, internucleotidic linkage modifications, etc. In some embodiments, oligonucleotides of the reference plurality differ only in that they are not conjugated to lipids.

[0666] In some embodiments, provided oligonucleotide compositions have lower toxicity. In some embodiments, provided oligonucleotide oligonucleotides have improved safety profile. In some embodiments, provided oligonucleotide compositions provided better protein binding properties.

[0667] Example splicing systems are widely known in the art. In some embodiments, a splicing system is an in vivo or in vitro system including components sufficient to achieve splicing of a relevant target transcript. In some embodiments, a splicing system is or comprises a spliceosome (e.g., protein and/or RNA components thereof). In some embodiments, a splicing system is or comprises an organellar membrane (e.g., a nuclear membrane) and/or an organelle (e.g., a nucleus). In some embodiments, a splicing system is or comprises a cell or population thereof. In some embodiments, a splicing system is or comprises a tissue. In some embodiments, a splicing system is or comprises an organism, e.g., an animal, e.g., a mammal such as a mouse, rat, monkey, human, etc.

[0668] In some embodiments, conjugation of oligonucleotides with lipids may improve oligonucleotide properties, e.g., activities, toxicities, etc. In some embodiments, as demonstrated by the present disclosure, conjugation may improve activities of oligonucleotides. In some embodiments, as demonstrated by the present disclosure, conjugation may improve stability of oligonucleotides. In some embodiments, as demonstrated by the present disclosure, conjugation may improve delivery of oligonucleotides to target locations. In some embodiments, as demonstrated by the present disclosure, conjugation may improve delivery of oligonucleotides into cells. In some embodiments, as demonstrated by the present disclosure, conjugation may improve delivery of oligonucleotides into cells in a subject. In some embodiments, as demonstrated by the present disclosure, conjugation may improve activity, safety, stability, and/or delivery of oligonucleotides.

[0669] In some embodiments, the present disclosure provides an oligonucleotide composition comprising one or more lipids, and a first plurality of oligonucleotides which:
[0670] 1) have a common base sequence complementary to a target sequence in a transcript; and
[0671] 2) comprise one or more modified sugar moieties and modified internucleotidic linkages, the oligonucleotide composition being characterized in that, when it is contacted with the transcript in a transcript splicing system, splicing of the transcript is altered relative to that observed under reference conditions selected from the group consisting of absence of the composition, presence of a reference composition, and combinations thereof;
[0672] wherein the lipids are optionally and independently conjugated to one or more oligonucleotides of the plurality.

[0673] In some embodiments, the present disclosure provides an oligonucleotide composition comprising one or more lipids, and a first plurality of oligonucleotides of a particular oligonucleotide type defined by:
[0674] 1) base sequence;
[0675] 2) pattern of backbone linkages;
[0676] 3) pattern of backbone chiral centers; and
[0677] 4) pattern of backbone phosphorus modifications;
[0678] wherein the lipids are optionally and independently conjugated to one or more oligonucleotides of the plurality, and level of oligonucleotides of the plurality is predetermined.

[0679] In some embodiments, the present disclosure provides an oligonucleotide composition comprising one or more lipids and a first plurality of oligonucleotides of a particular oligonucleotide type defined by:
[0680] 1) base sequence;
[0681] 2) pattern of backbone linkages;
[0682] 3) pattern of backbone chiral centers; and
[0683] 4) pattern of backbone phosphorus modifications,
   which composition is chirally controlled in that it is enriched, relative to a substantially racemic preparation of oligonucleotides having the same base sequence, for oligonucleotides of the particular oligonucleotide type,
[0684] the oligonucleotide composition being characterized in that, when it is contacted with the transcript in a transcript splicing system, splicing of the transcript is altered relative to that observed under reference conditions selected from the group consisting of absence of the composition, presence of a reference composition, and combinations thereof, and
[0685] wherein the lipids are optionally and independently conjugated to one or more oligonucleotides of the plurality, and level of oligonucleotides of the plurality is predetermined.

[0686] In some embodiments, the present disclosure provides an oligonucleotide composition comprising one or more lipids, and a first plurality of oligonucleotides comprising one or more wing regions and a core region, wherein:
[0687] oligonucleotides of the first plurality have the same base sequence; and
[0688] each wing region independently comprises one or more modified internucleotidic linkages and optionally one or more natural phosphate linkages, and the core region independently comprises one or more modified internucleotidic linkages; or
[0689] each wing region independently comprises one or more modified sugar moieties, and the core region comprises one or more un-modified sugar moieties; and
[0690] wherein the lipids are optionally and independently conjugated to one or more oligonucleotides of the plurality.

[0691] In some embodiments, the present disclosure provides an oligonucleotide composition comprising one or more lipids, and a first plurality of oligonucleotides comprising one or more wing regions and a core region, wherein:
[0692] oligonucleotides of the first plurality have the same base sequence;
[0693] each wing region independently has a length of two or more bases, and independently comprises one or more modified internucleotidic linkages and optionally one or more natural phosphate linkages; and
[0694] the core region independently has a length of two or more bases and independently comprises one or more modified internucleotidic linkages; and
[0695] wherein the lipids are optionally and independently conjugated to one or more oligonucleotides of the plurality.

[0696] In some embodiments, the present disclosure provides an oligonucleotide composition comprising one or more lipids and a first plurality of oligonucleotides comprising one or more wing regions and a core region, wherein:
[0697] oligonucleotides of the first plurality have the same base sequence;
[0698] each wing region independently has a length of two or more bases, and independently comprises one or more modified internucleotidic linkages and one or more natural phosphate linkages; and
[0699] the core region independently has a length of two or more bases and independently comprises one or more modified internucleotidic linkages; and
[0700] wherein the lipids are optionally and independently conjugated to one or more oligonucleotides of the plurality.

[0701] In some embodiments, the present disclosure provides an oligonucleotide composition comprising one ore more lipids, and a first plurality of oligonucleotides comprising two wing regions and a core region, wherein:
[0702] oligonucleotides of the first plurality have the same base sequence;
[0703] each wing region independently has a length of two or more bases, and independently comprises one or more modified internucleotidic linkages and one or more natural phosphate linkages; and
[0704] the core region independently has a length of two or more bases and independently comprises one or more modified internucleotidic linkages; and
[0705] wherein the lipids are optionally and independently conjugated to one or more oligonucleotides of the plurality.

[0706] In some embodiments, the present disclosure provides an oligonucleotide composition comprising one or more lipids, and a first plurality of oligonucleotides comprising two wing regions and a core region, wherein:
[0707] oligonucleotides of the first plurality have the same base sequence;
[0708] each wing region independently has a length of two or more bases, and independently comprises one or more modified internucleotidic linkages and one or more natural phosphate linkages;
[0709] the wing region to the 5′-end of the core region comprises at least one modified internucleotidic linkage followed by a natural phosphate linkage in the wing; and
[0710] the wing region to the 3′-end of the core region comprises at least one modified internucleotidic linkage preceded by a natural phosphate linkage in the wing;
[0711] the core region independently has a length of two or more bases and independently comprises one or more modified internucleotidic linkages; and
[0712] wherein the lipids are optionally and independently conjugated to one or more oligonucleotides of the plurality.

[0713] In some embodiments, the present disclosure provides an oligonucleotide composition comprising one or more lipids, and a first plurality of oligonucleotides comprising a wing region and a core region, wherein:
[0714] oligonucleotides of the first plurality have the same base sequence;
[0715] the wing region has a length of two or more bases, and comprises one or more modified internucleotidic linkages and one or more natural phosphate linkages;
[0716] the wing region is to the 5′-end of the core region and comprises a natural phosphate linkage between the two nucleosides at its 3′-end, or the wing region to the 3′-end of the core region and comprises a natural phosphate linkage between the two nucleosides at its 5′-end; and
[0717] the core region independently has a length of two or more bases and independently comprises one or more modified internucleotidic linkages; and
[0718] wherein the lipids are optionally and independently conjugated to one or more oligonucleotides of the plurality.

[0719] In some embodiments, the present disclosure provides an oligonucleotide composition comprising one or more lipids, and a first plurality of oligonucleotides comprising two wing regions and a core region, wherein:
[0720] oligonucleotides of the first plurality have the same base sequence;
[0721] each wing region independently has a length of two or more bases, and independently comprises one or more modified internucleotidic linkages and one or more natural phosphate linkages;
[0722] the wing region to the 5′-end of the core region comprises a natural phosphate linkage between the two nucleosides at its 3′-end;
[0723] the wing region to the 3′-end of a core region comprises a natural phosphate linkage between the two nucleosides at its 5′-end; and
[0724] the core region independently has a length of two or more bases and independently comprises one or more modified internucleotidic linkages; and
[0725] wherein the lipids are optionally and independently conjugated to one or more oligonucleotides of the plurality.

[0726] In some embodiments, the present disclosure provides an oligonucleotide composition comprising one or more lipids, and a first plurality of oligonucleotides comprising one or more wing regions and a core region, wherein:
[0727] oligonucleotides of the first plurality have the same base sequence; and
[0728] each wing region independently comprises one or more modified internucleotidic linkages and optionally one or more natural phosphate linkages, and the core region independently comprises one or more modified internucleotidic linkages; and
[0729] each wing region independently comprises one or more modified sugar moieties, and the core region comprises one or more un-modified sugar moieties; and
[0730] wherein the lipids are optionally and independently conjugated to one or more oligonucleotides of the plurality.

[0731] In some embodiments, the present disclosure provides an oligonucleotide composition comprising one or more lipids, and a first plurality of oligonucleotides comprising one or more wing regions and a core region, wherein:
[0732] oligonucleotides of the first plurality have the same base sequence; and
[0733] each wing region independently comprises one or more modified internucleotidic linkages and one or more natural phosphate linkages, and the core region independently comprises one or more modified internucleotidic linkages; and
[0734] each wing region independently comprises one or more modified sugar moieties, and the core region comprises one or more un-modified sugar moieties; and
[0735] wherein the lipids are optionally and independently conjugated to one or more oligonucleotides of the plurality.

[0736] In some embodiments, the present disclosure provides an oligonucleotide composition comprising one or more lipids, and a first plurality of oligonucleotides which:
[0737] 1) have a common base sequence; and
[0738] 2) comprise one or more wing regions and a core region;
   wherein:
[0739] each wing region comprises at least one modified sugar moiety; and
[0740] each core region comprises at least one un-modified sugar moiety; and
[0741] wherein the lipids are optionally and independently conjugated to one or more oligonucleotides of the plurality.

[0742] In some embodiments, the present disclosure provides a chirally controlled oligonucleotide composition comprising one or more lipids, and oligonucleotides defined by having:
[0743] 1) a common base sequence and length;
[0744] 2) a common pattern of backbone linkages; and
[0745] 3) a common pattern of backbone chiral centers, which composition is a substantially pure preparation of a single oligonucleotide in that a predetermined level of the oligonucleotides in the composition have the common base sequence and length, the common pattern of backbone linkages, and the common pattern of backbone chiral centers; and
[0746] wherein the lipids are optionally conjugated to one or more of the defined oligonucleotides.

[0747] In some embodiments, the present disclosure provides a chirally controlled oligonucleotide composition comprising one or more lipids, and oligonucleotides of a particular oligonucleotide type characterized by:
[0748] 1) a common base sequence and length;
[0749] 2) a common pattern of backbone linkages; and
[0750] 3) a common pattern of backbone chiral centers;
   which composition is chirally controlled in that it is enriched, relative to a substantially racemic preparation of oligonucleotides having the same base sequence and length, for oligonucleotides of the particular oligonucleotide type; and
[0751] wherein the lipids are optionally conjugated to one or more oligonucleotides of the oligonucleotide type.

[0752] In some embodiments, the present disclosure provides a chirally controlled oligonucleotide composition comprising one or more lipids, and oligonucleotides of a particular oligonucleotide type characterized by:
[0753] 1) a common base sequence and length;
[0754] 2) a common pattern of backbone linkages; and
[0755] 3) a common pattern of backbone chiral centers, which composition is a substantially pure preparation of a single oligonucleotide in that at least about 10% of the oligonucleotides in the composition have the common base sequence and length, the common pattern of backbone linkages, and the common pattern of backbone chiral centers; and
[0756] wherein the lipids are optionally and independently conjugated to one or more oligonucleotides of the oligonucleotide type.

[0757] In some embodiments, the present disclosure provides an oligonucleotide composition comprising one or more lipids, and a predetermined level of oligonucleotides which comprise one or more wing regions and a common core region, wherein:
[0758] each wing region independently has a length of two or more bases, and independently and optionally comprises one or more chiral internucleotidic linkages;
[0759] the core region independently has a length of two or more bases, and independently comprises one or more chiral internucleotidic linkages, and the common core region has:
[0760] 1) a common base sequence and length;
[0761] 2) a common pattern of backbone linkages; and
[0762] 3) a common pattern of backbone chiral centers; and
[0763] wherein the lipids are optionally and independently conjugated to one or more of the oligonucleotides.

[0764] In some embodiments, a common base sequence hybridizes with a transcript of dystrophin, myostatin, Huntingtin, a myostatin receptor, ActRIIB, ActRIIA, DMPK, Malat1, SMN2, dystrophia myotonica protein kinase (DMPK), Proprotein convertase subtilisin/kexin type 9 (PCSK9), SMAD7 or KRT14 (Keratin 14).

[0765] In some embodiments, levels of defined oligonucleotides in provided compositions (e.g., oligonucleotides of a plurality; oligonucleotides of an oligonucleotide type, oligonucleotides defined by sequence, backbone linkages, and/or backbone chiral centers, etc.) are predetermined. In some embodiments, levels of defined oligonucleotides are predetermined in that their absolute or relative (e.g., ratio, percentage, etc.) amounts within a composition is controlled.

[0766] A wing and core can be defined by any structural elements. In some embodiments, a wing and core is defined by nucleoside modifications, wherein a wing comprises a nucleoside modification that the core region does not have. In some embodiments, oligonucleotides in provided compositions have a wing-core structure of nucleoside modification. In some embodiments, oligonucleotides in provided compositions have a core-wing structure of nucleoside modification. In some embodiments, oligonucleotides in provided compositions have a wing-core-wing structure of nucleoside modification. In some embodiments, a wing and core is defined by modifications of the sugar moieties. In some embodiments, a wing and core is defined by modifications of the base moieties. In some embodiments, each sugar moiety in the wing region has the same 2′-modification which is not found in the core region. In some embodiments, each sugar moiety in the wing region has the same 2′-modification which is different than any sugar modifications in the core region. In some embodiments, each sugar moiety in the wing region has the same 2′-modification, and the core region has no 2′-modifications. In some embodiments, when two or more wings are present, each sugar moiety in a wing region has the same 2′-modification, yet the common 2′-modification in a first wing region can either be the same as or different from the common 2′-modification in a second wing region. In some embodiments, a wing and core is defined by pattern of backbone internucleotidic linkages. In some embodiments, a wing comprises a type of internucleotidic linkage, and/or a pattern of internucleotidic linkages, that are not found in a core. In some embodiments, a wing region comprises both a modified internucleotidic linkage and a natural phosphate linkage. In some embodiments, the internucleotidic linkage at the 5′-end of a wing to the 5′-end of the core region is a modified internucleotidic linkage. In some embodiments, the internucleotidic linkage at the 3′-end of a wing to the 3′-end of the core region is a modified internucleotidic linkage. In some embodiments, a modified internucleotidic linkage is a chiral internucleotidic linkage.

[0767] In some embodiments, each wing comprises at least one chiral internucleotidic linkage and at least one natural phosphate linkage. In some embodiments, each wing comprises at least one modified sugar moiety. In some embodiments, each wing sugar moiety is modified. In some embodiments, a wing sugar moiety is modified by a modification that is absent from the core region. In some embodiments, a wing region only has modified internucleotidic linkages at one or both of its ends. In some embodiments, a wing region only has a modified internucleotidic linkage at its 5′-end. In some embodiments, a wing region only has a modified internucleotidic linkage at its 3′-end. In some embodiments, a wing region only has modified internucleotidic linkages at its 5′- and 3′-ends. In some embodiments, a wing is to the 5′-end of a core, and the wing only has a modified internucleotidic linkage at its 5′-end. In some embodiments, a wing is to the 5′-end of a core, and the wing only has a modified internucleotidic linkage at its 3′-end. In some embodiments, a wing is to the 5′-end of a core, and the wing only has modified internucleotidic linkages at both its 5′- and 3′-ends. In some embodiments, a wing is to the 3′-end of a core, and the wing only has a modified internucleotidic linkage at its 5′-end. In some embodiments, a wing is to the 3′-end of a core, and the wing only has a modified internucleotidic linkage at its 3′-end. In some embodiments, a wing is to the 3′-end of a core, and the wing only has modified internucleotidic linkages at both its 5′- and 3′-ends.

[0768] In some embodiments, each internucleotidic linkage within a core region is modified. In some embodiments, each internucleotidic linkage within a core region is chiral. In some embodiments, a core region comprises a pattern of backbone chiral centers of (Sp)m(Rp)n, (Rp)n(Sp)m, (Np)t(Rp)n(Sp)m, or (Sp)t(Rp)n(Sp)m. In some embodiments, the pattern of backbone chiral centers of a core region is (Sp)m(Rp)n, (Rp)n(Sp)m, (Np)t(Rp)n(Sp)m, or (Sp)t(Rp)n(Sp)m. In some embodiments, a core region comprises a pattern of backbone chiral centers of (Rp)n(Sp)m, (Np)t(Rp)n(Sp)m, or (Sp)t(Rp)n(Sp)m, wherein m>2. In some embodiments, the pattern of backbone chiral centers of a core region is (Sp)m(Rp)n, (Rp)n(Sp)m, (Np)t(Rp)n(Sp)m, or (Sp)t(Rp)n(Sp)m, wherein m>2. Among other things, in some embodiments such patterns can provide or enhance controlled cleavage of a target sequence, e.g., an RNA sequence.

[0769] In some embodiments, oligonucleotides in provided compositions have a common pattern of backbone phosphorus modifications. In some embodiments, a provided composition is an oligonucleotide composition that is chirally controlled in that the composition contains a predetermined level of oligonucleotides of an individual oligonucleotide type, wherein an oligonucleotide type is defined by:
[0770] 1) base sequence;
[0771] 2) pattern of backbone linkages;
[0772] 3) pattern of backbone chiral centers; and
[0773] 4) pattern of backbone phosphorus modifications.

[0774] As noted above and understood in the art, in some embodiments, base sequence of an oligonucleotide may refer to the identity and/or modification status of nucleoside residues (e.g., of sugar and/or base components, relative to standard naturally occurring nucleotides such as adenine, cytosine, guanosine, thymine, and uracil) in the oligonucleotide and/or to the hybridization character (i.e., the ability to hybridize with particular complementary residues) of such residues.

[0775] In some embodiments, a particular oligonucleotide type may be defined by
[0776] 1A) base identity;
[0777] 1B) pattern of base modification;
[0778] 1C) pattern of sugar modification;
[0779] 2) pattern of backbone linkages;
[0780] 3) pattern of backbone chiral centers; and
[0781] 4) pattern of backbone phosphorus modifications.

[0782] Thus, in some embodiments, oligonucleotides of a particular type may share identical bases but differ in their pattern of base modifications and/or sugar modifications. In some embodiments, oligonucleotides of a particular type may share identical bases and pattern of base modifications (including, e.g., absence of base modification), but differ in pattern of sugar modifications. In some embodiments, oligonucleotides of a particular type are chemically identical in that they have the same base sequence (including length), the same pattern of chemical modifications to sugar and base moieties, the same pattern of backbone linkages (e.g., pattern of natural phosphate linkages, phosphorothioate linkages, phosphorothioate triester linkages, and combinations thereof), the same pattern of backbone chiral centers (e.g., pattern of stereochemistry (Rp/Sp) of chiral internucleotidic linkages), and the same pattern of backbone phosphorus modifications (e.g., pattern of modifications on the internucleotidic phosphorus atom, such as —S—, and -L-R¹ of formula I).

[0783] In some embodiments, the present disclosure provides chirally controlled oligonucleotide compositions of oligonucleotides comprising multiple (e.g., more than 5, 6, 7, 8, 9, or 10) internucleotidic linkages, and particularly for oligonucleotides comprising multiple (e.g., more than 5, 6, 7, 8, 9, or 10) chiral internucleotidic linkages. In some embodiments, in a stereorandom or racemic preparation of oligonucleotides, at least one chiral internucleotidic linkage is formed with less than 90:10, 95:5, 96:4, 97:3, or 98:2 diastereoselectivity. In some embodiments, for a stereoselective or chirally controlled preparation of oligonucleotides, each chiral internucleotidic linkage is formed with greater than 90:10, 95:5, 96:4, 97:3, or 98:2 diastereoselectivity. In some embodiments, for a stereoselective or chirally controlled preparation of oligonucleotides, each chiral internucleotidic linkage is formed with greater than 95:5 diastereoselectivity. In some embodiments, for a stereoselective or chirally controlled preparation of oligonucleotides, each chiral internucleotidic linkage is formed with greater than 96:4 diastereoselectivity. In some embodiments, for a stereoselective or chirally controlled preparation of oligonucleotides, each chiral internucleotidic linkage is formed with greater than 97:3 diastereoselectivity. In some embodiments, for a stereoselective or chirally controlled preparation of oligonucleotides, each chiral internucleotidic linkage is formed with greater than 98:2 diastereoselectivity. In some embodiments, for a stereoselective or chirally controlled preparation of oligonucleotides, each chiral internucleotidic linkage is formed with greater than 99:1 diastereoselectivity. In some embodiments, diastereoselectivity of a chiral internucleotidic linkage in an oligonucleotide may be measured through a model reaction, e.g. formation of a dimer under essentially the same or comparable conditions wherein the dimer has the same internucleotidic linkage as the chiral internucleotidic linkage, the 5′-nucleoside of the dimer is the same as the nucleoside to the 5′-end of the chiral internucleotidic linkage, and the 3′-nucleoside of the dimer is the same as the nucleoside to the 3′-end of the chiral internucleotidic linkage.

[0784] As described herein, provided compositions and methods are capable of altering splicing of transcripts. In some embodiments, provided compositions and methods provide improved splicing patterns of transcripts compared to reference conditions selected from the group consisting of absence of the composition, presence of a reference composition, and combinations thereof. An improvement can be an improvement of any desired biological functions. In some embodiments, for example, in DMD, an improvement is production of an mRNA from which a dystrophin protein with improved biological activities is produced. In some other embodiments, for example, an improvement is down-regulation of STAT3, HNRNPH1 and/or KDR to mitigate tumor progression, malignancy, and angiogenesis through forced splicing-induced nonsense-mediated decay (DSD-NMD).

[0785] In some embodiments, the present disclosure provides methods for modulating levels of target nucleic acids in a system comprising administering a provided composition. In some embodiments, a system is an in vitro system. In some embodiments, a system is a cell. In some embodiments, a system is a tissue. In some embodiments, a system is an organ. In some embodiments, a system is a subject. In some embodiments, a target nucleic acid is genomic DNA. In some embodiments, a target nucleic acid is a transcript. In some embodiments, a target nucleic acid is a primary transcript. In some embodiments, a target nucleic acid is a processed transcript. In some embodiments, a target nucleic acid is a spliced transcript. In some embodiments, a target nucleic acid is RNA. In some embodiments, a target nucleic acid is mRNA. In some embodiments, a target nucleic acid is pre-mRNA. In some embodiments, technologies of the present disclosure which comprise one or more lipids provide better delivery to target locations, better safety, better activity, better stability, and/or better overall results. etc. compared to absence of the lipids.

[0786] In some embodiments, the present disclosure provides a method for altering splicing of a target transcript, comprising administering a provided composition comprising one or more lipids, wherein the splicing of the target transcript is altered relative to reference conditions selected from the group consisting of absence of the lipids, absence of the composition, presence of a reference composition, and combinations thereof.

[0787] In some embodiments, the present disclosure provides a method of generating a set of spliced products from a target transcript, the method comprising steps of:

[0788] contacting a splicing system containing the target transcript with a provided oligonucleotide composition comprising one or more lipids and a first plurality of oligonucleotides, in an amount, for a time, and under conditions sufficient for a set of spliced products to be generated that is different from a set generated under reference conditions selected from the group consisting of absence of the lipids, absence of the composition, presence of a reference composition, and combinations thereof.

[0789] As widely known in the art, many diseases and/or conditions are associated with transcript splicing. For examples, see Garcia-Blanco, et al., Alternative splicing in disease and therapy, Nat. Biotechnol. 2004 May; 22(5):535-46; Wang, et al., Splicing in disease: disruption of the splicing code and the decoding machinery, Nat. Rev. Genet. 2007 October; 8(10):749-61; Havens, et al., Targeting RNA splicing for disease therapy, Wiley Interdiscip. Rev. RNA. 2013 May-June; 4(3):247-66. In some embodiments, the present disclosure provides compositions and methods for treating or preventing diseases.

[0790] In some embodiments, the present disclosure provides a method for treating or preventing a disease, comprising administering to a subject an oligonucleotide composition described herein.

[0791] In some embodiments, the present disclosure provides a method for treating or preventing a disease, comprising administering to a subject a provided oligonucleotide composition.

[0792] In some embodiments, the present disclosure provides a method for treating or preventing a disease, comprising administering a provided oligonucleotide composition,
[0793] the oligonucleotide composition being characterized in that, when it is contacted with the transcript in a transcript splicing system, splicing of the transcript is altered relative to that observed under reference conditions selected from the group consisting of absence of the composition, presence of a reference composition, and combinations thereof.

[0794] In some embodiments, a disease is one in which, after administering a provided composition, one or more spliced transcripts repair, restore or introduce a new beneficial function. For example, in DMD, after skipping one or more exons, functions of dystrophin can be restored, or partially restored, through a truncated but (partially) active version. In some embodiments, a disease is one in which, after administering a provided composition, one or more spliced transcripts repair, a gene is effectively knockdown by altering splicing of the gene transcript.

[0795] In some embodiments, a disease is Duchenne muscular dystrophy. In some embodiments, a disease is spinal muscular atrophy (SMA). In some embodiments, a disease is cancer.

[0796] In general, properties of oligonucleotide compositions as described herein can be assessed using any appropriate assay. Relative toxicity and/or protein binding properties and/or activity and/or delivery for different compositions (e.g., stereocontrolled vs non-stereocontrolled, and/or different stereocontrolled compositions) are typically desirably determined in the same assay, in some embodiments substantially simultaneously and in some embodiments with reference to historical results.

[0797] Those of skill in the art will be aware of and/or will readily be able to develop appropriate assays for particular oligonucleotide compositions. The present disclosure provides descriptions of certain particular assays, for example that may be useful in assessing one or more features of oligonucleotide composition behavior e.g., complement activation, injection site inflammation, protein biding, etc.

[0798] For example, certain assays that may be useful in the assessment of toxicity and/or protein binding properties and/or activity and/or delivery of oligonucleotide compositions may include any assay described and/or exemplified herein.

[0799] In some embodiments, the present disclosure demonstrates that oligonucleotide compositions comprising oligonucleotides with conjugation to one or more lipids and controlled structural elements, e.g., controlled chemical modification and/or controlled backbone stereochemistry patterns, provide unexpected properties, including but not limited to those described herein. In some embodiments, provided compositions have improved properties, such as improved splicing-altering capabilities, lower toxicity, or improved protein binding profile, and/or improved delivery, etc. Particularly, in some embodiments, the present disclosure provides compositions and methods for improved delivery to target locations. Further, in some embodiments, the present disclosure provides compositions and methods for altering splicing of transcripts. In some embodiments, the present disclosure provides compositions and methods for improving splicing of transcripts. In some embodiments, altered transcript splicing by provided compositions and methods include production of products having desired and/or improved biological functions, and/or knockdown of undesired product by, e.g., modifying splicing products so that undesired biological functions can be suppressed or removed.

[0800] In some embodiments, a transcript is pre-mRNA. In some embodiments, a splicing product is mature RNA. In some embodiments, a splicing product is mRNA. In some embodiments, alteration comprises skipping one or more exons. In some embodiments, splicing of a transcript is improved in that exon skipping increases levels of mRNA and proteins that have improved beneficial activities compared with absence of exon skipping. In some embodiments, an exon causing frameshift is skipped. In some embodiments, an exon comprising an undesired mutation is skipped. In some embodiments, an exon comprising a premature termination codon is skipped. An undesired mutation can be a mutation causing changes in protein sequences; it can also be a silent mutation. In some embodiments, an exon comprising an undesired SNP is skipped.

[0801] In some embodiments, splicing of a transcript is improved in that exon skipping lowers levels of mRNA and proteins that have undesired activities compared with absence of exon skipping. In some embodiments, a target is knocked down through exon skipping which, by skipping one or more exons, causes premature stop codon and/or frameshift mutations.

[0802] Reading frame correction is achieved by skipping one or two exons flanking a deletion, by skipping in-frame exons containing a nonsense mutation, or by skipping duplicated exons.

[0803] In some embodiments, the present disclosure provides compositions and methods for reducing certain undesired repeats, such as CAG repeat (see, e.g., Evers, et al., Targeting several CAG expansion diseases by a single antisense oligonucleotide, PLoS One. 2011; 6(9):e24308. doi: 10.1371/journal.pone.0024308; Mulders, et al., Triplet-repeat oligonucleotide-mediated reversal of RNA toxicity in myotonic dystrophy, Proc Natl Acad Sci USA. 2009 Aug. 18; 106(33):13915-20; etc.) by altering splicing, e.g., exon skipping. In some embodiments, example targets include but are not limited to: HTT (Huntingtin), ATXN3 (Ataxin 3), DMPK (dystrophia myotonica protein kinase), CNBP (Cellular Nucleic Acid Binding Protein), AR (Androgen Receptor), FOX01 (forkhead box protein 01), PCSK9 (proprotein convertase subtilisin/kexin type 9), TTR (transthyretin), AAT (alpha-1 antitrypsin), TMPRSS6 (transmembrane protease, serine 6), ALAS1 (aminolevulinate synthase 1), ATIII (antithrombin 3), FVII (factor VII), HAMP (hepcidin antimicrobial peptide), FXI (factor XI), FXII (factor XII), and PD-L1 (programmed death-ligand 1), APOC3 (Apolipoprotein C-III), PNPLA3 (patatin like phospholipase domain containing 3), and C9orf72. In some embodiments, targets include but are not limited to HTT, ATXN3, DMPK, CNBP, AR, C90RF72 (target for familial frontotemporal dementia and amyotrophic lateral sclerosis) and those listed below:

| | | | | | | | |
|---|---|---|---|---|---|---|---|
| | | | | | Repeat | | |
| | | | Parent of | Repeat | number | Repeat | |
| | | | origin of | number | (pre- | number | Somatic |
| Disease | Sequence | Location | expansion | (normal) | mutation) | (disease) | instability |

Diseases with coding TNRs

| | | | | | | | |
|---|---|---|---|---|---|---|---|
| DRPLA | CAG | ATN1 (exon 5) | P | 6-35 | 35-48 | 49-88 | Yes |
| HD | CAG | HTT (exon 1) | P | 6-29 | 29-37 | 38-180 | Yes |
| OPMD | GCN | PABPN1 (exon | P and M | 10 | 12-17 | >11 | None found in |
| | | 1) | | | | | tissue tested |
| | | | | | | | (hypothalamus) |
| SCA1 | CAG | ATXN1 (exon | P | 6-39 | 40 | 41-83 | Yes |
| | | 8) | | | | | |
| SCA2 | CAG | ATXN2 (exon | P | <31 | 31-32 | 32-200 | Unknown |
| | | 1) | | | | | |
| SCA3 | CAG | ATXN3 (exon | P | 12-40 | 41-85 | 52-86 | Unknown |
| (Machado- | | 8) | | | | | |
| Joseph | | | | | | | |
| disease) | | | | | | | |
| SCA6 | CAG | CACNA1A (exon | P | <18 | 19 | 20-33 | None found |
| | | 47) | | | | | |
| SCA7 | CAG | ATXN7 (exon | P | 4-17 | 28-33 | >36 | Yes |
| | | 3) | | | | to >460 | |
| SCA17 | CAG | TBP (exon 3) | P > M | 25-42 | 43-48 | 45-66 | Yes |
| SMBA | CAG | AR (exon 1) | P | 13-31 | 32-39 | 40 | None found |

Diseases with non-coding TNRs

| | | | | | | | |
|---|---|---|---|---|---|---|---|
| DM1 | CTG | DMPK (3′ UTR) | M | 5-37 | 37-50 | <50 | Yes |
| DM2 | CCTG | CNBP (intron | Uncertain | <30 | 31-74 | 75-11,000 | Yes |
| | | 1) | | | | | |
| FRAX-E | GCC | AFF2 (5′ UTR) | M | 4-39 | 40-200 | >200 | Unknown |
| FRDA | GAA | FXN (intron 1) | Recessive | 5-30 | 31-100 | 70-1,000 | Yes |
| FXS | CGG | FMR1 (5′ UTR) | M | 6-50 | 55-200 | 200-4,000 | Yes |
| HDL2 | CTG | JPH3 (exon 2A) | M | 6-27 | 29-35 | 36-57 | Unknown |
| SCAB | CTG | ATXN8OS (3′ | M | 15-34 | 34-89 | 89-250 | Unknown |
| | | UTR) | | | | | |
| SCA10 | ATTCT | ATXN10 (intron | M and P | 10-29 | 29-400 | 400-4,500 | Yes |
| | | 9) | (smaller | | | | |
| | | | changes | | | | |
| | | | with M) | | | | |
| SCA12 | CAG | PPP2R2B (5′ | M and P | 7-28 | 28-66 | 66-78 | None found |
| | | UTR) | (more | | | | |
| | | | unstable | | | | |
| | | | with P) | | | | |

AFF2, AF4/FMR2 family, member 2; AR, androgen receptor;
ATN1, atrophin 1;
ATXN, ataxin;
ATXN8OS, ATXN8 opposite strand (non-protein coding);
CACNA1A, calcium channel, voltage-dependent, P/Q type, alpha 1A subunit;
CNBP, CCHC-type zinc finger nucleic acid binding protein;
DM, myotonic dystrophy; DMPK, dystrophia myotonica-protein kinase;
DRPLA, dentatorubral-pallidoluysian atrophy;
FMR1, fragile X mental retardation 1;
FRAX-E, mental retardation, X-linked, associated with FRAXE;
FRDA, Friedreich's ataxia; FXN, frataxin;
FXS, fragile X syndrome;
FXTAS, fragile X-associated tremor/ataxia syndrome;
HD, Huntington's disease;
HDL2, Huntington's disease-like 2;
HTT, huntingtin;
JPH3, junctophilin 3;
M, maternal;
OPMD, oculopharyngeal muscular dystrophy;
P, paternal;
PABPN1, poly(A) binding protein nuclear 1;
PPP2R2B, protein phosphatase 2, regulatory subunit B;
SCA, spinocerebellar ataxia;
SMBA, spinomuscular bulbar atrophy;
TBP, TATA-box binding protein;
TNR, trinucleotide repeat.

[0804] In some embodiments, provided oligonucleotides in provided compositions, e.g., oligonucleotides of a first plurality, comprise base modifications, sugar modifications, and/or internucleotidic linkage modifications. In some embodiments, provided oligonucleotides comprise base modifications and sugar modifications. In some embodiments, provided oligonucleotides comprise base modifications and internucleotidic linkage modifications. In some embodiments, provided oligonucleotides comprise sugar modifications and internucleotidic modifications. In some embodiments, provided compositions comprise base modifications, sugar modifications, and internucleotidic linkage modifications. Example chemical modifications, such as base modifications, sugar modifications, internucleotidic linkage modifications, etc. are widely known in the art including but not limited to those described in this disclosure. In some embodiments, a modified base is substituted A, T, C, G or U. In some embodiments, a sugar modification is 2′-modification. In some embodiments, a 2′-modification is 2′-R¹. In some embodiments, a 2′-modification is 2′-F modification. In some embodiments, a 2′-modification is 2′-OR¹. In some embodiments, a 2′-modification is 2′-OR¹, wherein R¹ is optionally substituted alkyl. In some embodiments, a 2′-modification is 2′-OMe. In some embodiments, a 2′-modification is 2′-MOE. In some embodiments, a modified sugar moiety is a bridged bicyclic or polycyclic ring. In some embodiments, a modified sugar moiety is a bridged bicyclic or polycyclic ring having 5-20 ring atoms wherein one or more ring atoms are optionally and independently heteroatoms. Example ring structures are widely known in the art, such as those found in BNA, LNA, etc. In some embodiments, provided oligonucleotides may comprise more than one types of sugar modifications; in some embodiments, provided oligonucleotides comprise both 2′-F and 2′-OR¹ modifications. In some embodiments, provided oligonucleotides comprise both 2′-F and 2′-OMe modifications. In some embodiments, provided oligonucleotides comprise both 2′-F and 2′-OMe modifications, and both phosphorothioate and natural phosphate linkages. In some embodiments, each chiral internucleotidic linkage, e.g., phosphorothioate linkage, is chirally controlled. In some embodiments, provided oligonucleotides comprise both one or more modified internucleotidic linkages and one or more natural phosphate linkages. In some embodiments, oligonucleotides comprising both modified internucleotidic linkage and natural phosphate linkage and compositions thereof provide improved properties, e.g., activities and toxicities, etc. In some embodiments, a modified internucleotidic linkage is a chiral internucleotidic linkage. In some embodiments, a modified internucleotidic linkage is a phosphorothioate linkage. In some embodiments, a modified internucleotidic linkage is a substituted phosphorothioate linkage.

[0805] Among other things, the present disclosure encompasses the recognition that stereorandom oligonucleotide preparations contain a plurality of distinct chemical entities that differ from one another, e.g., in the stereochemical structure of individual backbone chiral centers within the oligonucleotide chain. Without control of stereochemistry of backbone chiral centers, stereorandom oligonucleotide preparations provide uncontrolled compositions comprising undetermined levels of oligonucleotide stereoisomers. Even though these stereoisomers may have the same base sequence, they are different chemical entities at least due to their different backbone stereochemistry, and they can have, as demonstrated herein, different properties, e.g., activities, toxicities, etc. Among other things, the present disclosure provides new compositions that are or contain particular stereoisomers of oligonucleotides of interest. In some embodiments, a particular stereoisomer may be defined, for example, by its base sequence, its length, its pattern of backbone linkages, and its pattern of backbone chiral centers. As is understood in the art, in some embodiments, base sequence may refer to the identity and/or modification status of nucleoside residues (e.g., of sugar and/or base components, relative to standard naturally occurring nucleotides such as adenine, cytosine, guanosine, thymine, and uracil) in an oligonucleotide and/or to the hybridization character (i.e., the ability to hybridize with particular complementary residues) of such residues. In some embodiments, oligonucleotides in provided compositions comprise sugar modifications, e.g., 2′-modifications, at e.g., a wing region. In some embodiments, oligonucleotides in provided compositions comprise a region in the middle, e.g., a core region, that has no sugar modifications. In some embodiments, the present disclosure provide an oligonucleotide composition comprising a predetermined level of oligonucleotides of an individual oligonucleotide type which are chemically identical, e.g., they have the same base sequence, the same pattern of nucleoside modifications (modifications to sugar and base moieties, if any), the same pattern of backbone chiral centers, and the same pattern of backbone phosphorus modifications. The present disclosure demonstrates, among other things, that individual stereoisomers of a particular oligonucleotide can show different stability and/or activity (e.g., functional and/or toxicity properties) from each other. In some embodiments, property improvements achieved through inclusion and/or location of particular chiral structures within an oligonucleotide can be comparable to, or even better than those achieved through use of particular backbone linkages, residue modifications, etc. (e.g., through use of certain types of modified phosphates [e.g., phosphorothioate, substituted phosphorothioate, etc.], sugar modifications [e.g., 2′-modifications, etc.], and/or base modifications [e.g., methylation, etc.]). Among other things, the present disclosure recognizes that, in some embodiments, properties (e.g., activities, toxicities, etc.) of an oligonucleotide can be adjusted by optimizing its pattern of backbone chiral centers, optionally in combination with adjustment/optimization of one or more other features (e.g., linkage pattern, nucleoside modification pattern, etc.) of the oligonucleotide. As exemplified by various examples in the present disclosure, provided chirally controlled oligonucleotide compositions can demonstrate improved properties, such as lower toxcicity, improved protein binding profile, improved delivery, etc.

[0806] In some embodiments, oligonucleotide properties can be adjusted by optimizing stereochemistry (pattern of backbone chiral centers) and chemical modifications (modifications of base, sugar, and/or internucleotidic linkage). Among other things, the present disclosure demonstrates that stereochemistry can further improve properties of oligonucleotides comprising chemical modifications. In some embodiments, the present disclosure provides oligonucleotide compositions wherein the oligonucleotides comprise nucleoside modifications, chiral internucleotidic linkages and natural phosphate linkages. For example, WV-1092 (mG*SmGmCmAmC*SA*SA*SG*SG*SG*SC*SA*SC*RA*SG*SmAmCmUmU*SmC (SEQ ID NO: 8)) comprises 2′-OMe modifications, phosphate and phosphorothioate linkages in its 5′- and 3′-wing regions, and phosphorothioate linkages in its core regions.

[0807] In some embodiments, the present disclosure provides oligonucleotide compositions which, unexpectedly, greatly improve properties of oligonucleotides. In some embodiments, provided oligonucleotide compositions provides surprisingly low toxicity. In some embodiments, provided oligonucleotide compositions provides surprisingly improved protein binding profile. In some embodiments, provided oligonucleotide compositions provides surprisingly enhanced delivery. In some embodiments, certain property improvement, such as lower toxicity, improved protein binding profile, and/or enhanced delivery, etc., are achieved without sacrificing other properties, e.g., activities, specificity, etc. In some embodiments, provided compositions provides lower toxicity, improved protein binding profile, and/or enhanced delivery, and improved activity, stability, and/or specificity (e.g., target-specificity, cleavage site specificity, etc.). Example improved activities (e.g., enhanced cleavage rates, increased target-specificity, cleavage site specificity, etc.) include but are not limited to those described in WO/2014/012081 and WO/2015/107425.

[0808] In some embodiments, a pattern of backbone chiral centers provides increased stability. In some embodiments, a pattern of backbone chiral centers provides surprisingly increased activity. In some embodiments, a pattern of backbone chiral centers provides increased stability and activity. In some embodiments, a pattern of backbone chiral centers provides surprisingly low toxicity. In some embodiments, a pattern of backbone chiral centers provides surprisingly low immune response. In some embodiments, a pattern of backbone chiral centers provides surprisingly low complement activation. In some embodiments, a pattern of backbone chiral centers provides surprisingly low complement activation via the alternative pathway. In some embodiments, a pattern of backbone chiral centers provides surprisingly improved protein binding profile. In some embodiments, a pattern of backbone chiral centers provides surprisingly increased binding to certain proteins. In some embodiments, a pattern of backbone chiral centers provides surprisingly enhanced delivery.

[0809] In some embodiments, a pattern of backbone chiral centers comprises or is (Sp)m(Rp)n, (Rp)n(Sp)m, (Np)t(Rp)n(Sp)m, or (Sp)t(Rp)n(Sp)m. In some embodiments, a pattern of backbone chiral centers comprises or is (Rp)n(Sp)m, (Np)t(Rp)n(Sp)m, or (Sp)t(Rp)n(Sp)m, wherein m>2. In some embodiments, a pattern of backbone chiral centers comprises or is (Rp)n(Sp)m, (Np)t(Rp)n(Sp)m, or (Sp)t(Rp)n(Sp)m, wherein n is 1, t>1, and m>2. In some embodiments, m>3. In some embodiments, m>4. In some embodiments, a pattern of backbone chiral centers comprises one or more achiral natural phosphate linkages.

[0810] In some embodiments, the present disclosure recognizes that chemical modifications, such as modifications of nucleosides and internucleotidic linkages, can provide enhanced properties. In some embodiments, the present disclosure demonstrates that combinations of chemical modifications and stereochemistry can provide unexpected, greatly improved properties (e.g., bioactivity, selectivity, etc.). In some embodiments, chemical combinations, such as modifications of sugars, bases, and/or internucleotidic linkages, are combined with stereochemistry patterns, e.g., (Rp)n(Sp)m, (Np)t(Rp)n(Sp)m, or (Sp)t(Rp)n(Sp)m, to provide oligonucleotides and compositions thereof with surprisingly enhanced properties. In some embodiments, a provided oligonucleotide composition is chirally controlled, and comprises a combination of 2′-modification of one or more sugar moieties, one or more natural phosphate linkages, one or more phosphorothioate linkages, and a stereochemistry pattern of (Rp)n(Sp)m, (Np)t(Rp)n(Sp)m, or (Sp)t(Rp)n(Sp)m, wherein m>2. In some embodiments, n is 1, t>1, and m>2. In some embodiments, m>3. In some embodiments, m>4.

[0811] In some embodiments, a pattern of backbone chiral centers comprises or is (Rp)n(Sp)m, (Sp)t(Rp)n, (Np)t(Rp)n(Sp)m, or (Sp)t(Rp)n(Sp)m. In some embodiments, a pattern of backbone chiral centers comprises or is (Rp)n(Sp)m. In some embodiments, a pattern of backbone chiral centers comprises or is (Sp)t(Rp)n. In some embodiments, a pattern of backbone chiral centers comprises or is (Np)t(Rp)n(Sp)m. In some embodiments, a pattern of backbone chiral centers comprises or is (Sp)t(Rp)n(Sp)m. In some embodiments, each of t and m is independently greater than 1, 2, 3, 4, 5, 6, 7, 8, 9, 10, 11, 12, 13, 14, 15, 16, 17, 18, 19 or 20. In some embodiments, each oft and m is independently greater than 1. In some embodiments, each of t and m is independently greater than 2. In some embodiments, each of t and m is independently greater than 2. In some embodiments, each of t and m is independently greater than 3. In some embodiments, each of t and m is independently greater than 4. In some embodiments, each of t and m is independently greater than 5. In some embodiments, each of t and m is independently greater than 6. In some embodiments, each of t and m is independently greater than 7. In some embodiments, each of t and m is independently greater than 8. In some embodiments, each of t and m is independently greater than 9. In some embodiments, each of t and m is independently greater than 10. In some embodiments, each of t and m is independently greater than 11. In some embodiments, each of t and m is independently greater than 12. In some embodiments, each of t and m is independently greater than 13. In some embodiments, each of t and m is independently greater than 14. In some embodiments, each of t and m is independently greater than 15. In some embodiments, t is greater than 1, 2, 3, 4, 5, 6, 7, 8, 9, 10, 11, 12, 13, 14, 15, 16, 17, 18, 19 or 20. In some embodiments, t is greater than 1. In some embodiments, t is greater than 2. In some embodiments, t is greater than 2. In some embodiments, t is greater than 3. In some embodiments, t is greater than 4. In some embodiments, t is greater than 5. In some embodiments, t is greater than 6. In some embodiments, t is greater than 7. In some embodiments, t is greater than 8. In some embodiments, t is greater than 9. In some embodiments, t is greater than 10. In some embodiments, t is greater than 11. In some embodiments, t is greater than 12. In some embodiments, t is greater than 13. In some embodiments, t is greater than 14. In some embodiments, t is greater than 15. In some embodiments, t is 1, 2, 3, 4, 5, 6, 7, 8, 9, 10, 11, 12, 13, 14, 15, 16, 17, 18, 19 or 20. In some embodiments, t is 1. In some embodiments, t is 2. In some embodiments, t is 2. In some embodiments, t is 3. In some embodiments, t is 4. In some embodiments, t is 5. In some embodiments, t is 6. In some embodiments, t is 7. In some embodiments, t is 8. In some embodiments, t is 9. In some embodiments, t is 10. In some embodiments, t is 11. In some embodiments, t is 12. In some embodiments, t is 13. In some embodiments, t is 14. In some embodiments, t is 15. In some embodiments, m is greater than 1, 2, 3, 4, 5, 6, 7, 8, 9, 10, 11, 12, 13, 14, 15, 16, 17, 18, 19 or 20. In some embodiments, m is greater than 1. In some embodiments, m is greater than 2. In some embodiments, m is greater than 2. In some embodiments, m is greater than 3. In some embodiments, m is greater than 4. In some embodiments, m is greater than 5. In some embodiments, m is greater than 6. In some embodiments, m is greater than 7. In some embodiments, m is greater than 8. In some embodiments, m is greater than 9. In some embodiments, m is greater than 10. In some embodiments, m is greater than 11. In some embodiments, m is greater than 12. In some embodiments, m is greater than 13. In some embodiments, m is greater than 14. In some embodiments, m is greater than 15. In some embodiments, m is 1, 2, 3, 4, 5, 6, 7, 8, 9, 10, 11, 12, 13, 14, 15, 16, 17, 18, 19 or 20. In some embodiments, m is 1. In some embodiments, m is 2. In some embodiments, m is 2. In some embodiments, m is 3. In some embodiments, m is 4. In some embodiments, m is 5. In some embodiments, m is 6. In some embodiments, m is 7. In some embodiments, m is 8. In some embodiments, m is 9. In some embodiments, m is 10. In some embodiments, m is 11. In some embodiments, m is 12. In some embodiments, m is 13. In some embodiments, m is 14. In some embodiments, m is 15. In some embodiments, t=m. In some embodiments, n is greater than 1, 2, 3, 4, 5, 6, 7, 8, 9, 10, 11, 12, 13, 14, 15, 16, 17, 18, 19 or 20. In some embodiments, n is greater than 1. In some embodiments, n is greater than 2. In some embodiments, n is greater than 2. In some embodiments, n is greater than 3. In some embodiments, n is greater than 4. In some embodiments, n is greater than 5. In some embodiments, n is greater than 6. In some embodiments, n is greater than 7. In some embodiments, n is greater than 8. In some embodiments, n is greater than 9. In some embodiments, n is greater than 10. In some embodiments, n is greater than 11. In some embodiments, n is greater than 12. In some embodiments, n is greater than 13. In some embodiments, n is greater than 14. In some embodiments, n is greater than 15. In some embodiments, n is 1, 2, 3, 4, 5, 6, 7, 8, 9, 10, 11, 12, 13, 14, 15, 16, 17, 18, 19 or 20. In some embodiments, n is 1. In some embodiments, n is 2. In some embodiments, n is 2. In some embodiments, n is 3. In some embodiments, n is 4. In some embodiments, n is 5. In some embodiments, n is 6. In some embodiments, n is 7. In some embodiments, n is 8. In some embodiments, n is 9. In some embodiments, n is 10. In some embodiments, n is 11. In some embodiments, n is 12. In some embodiments, n is 13. In some embodiments, n is 14. In some embodiments, n is 15.

[0812] In some embodiments, provided oligonucleotides comprise one or more modified sugar moieties. In some embodiments, provided oligonucleotides comprise one or more modified sugar moieties. In some embodiments, provided oligonucleotides comprise 2 or more modified sugar moieties. In some embodiments, provided oligonucleotides comprise 3 or more modified sugar moieties. In some embodiments, provided oligonucleotides comprise 4 or more modified sugar moieties. In some embodiments, provided oligonucleotides comprise 5 or more modified sugar moieties. In some embodiments, provided oligonucleotides comprise 6 or more modified sugar moieties. In some embodiments, provided oligonucleotides comprise 7 or more modified sugar moieties. In some embodiments, provided oligonucleotides comprise 8 or more modified sugar moieties. In some embodiments, provided oligonucleotides comprise 9 or more modified sugar moieties. In some embodiments, provided oligonucleotides comprise 10 or more modified sugar moieties. In some embodiments, provided oligonucleotides comprise 15 or more modified sugar moieties. In some embodiments, provided oligonucleotides comprise 20 or more modified sugar moieties. In some embodiments, provided oligonucleotides comprise 25 or more modified sugar moieties. In some embodiments, provided oligonucleotides comprise 30 or more modified sugar moieties.

[0813] Provided oligonucleotides can comprise various number of chiral internucleotidic linkages. In some embodiments, provided oligonucleotides comprise no chiral internucleotidic linkages. In some embodiments, provided oligonucleotides comprise one chiral internucleotidic linkage. In some embodiments, provided oligonucleotides comprise 2 or more chiral internucleotidic linkages. In some embodiments, provided oligonucleotides comprise 3 or more chiral internucleotidic linkages. In some embodiments, provided oligonucleotides comprise 4 or more chiral internucleotidic linkages. In some embodiments, provided oligonucleotides comprise 5 or more chiral internucleotidic linkages. In some embodiments, provided oligonucleotides comprise 6 or more chiral internucleotidic linkages. In some embodiments, provided oligonucleotides comprise 7 or more chiral internucleotidic linkages. In some embodiments, provided oligonucleotides comprise 8 or more chiral internucleotidic linkages. In some embodiments, provided oligonucleotides comprise 9 or more chiral internucleotidic linkages. In some embodiments, provided oligonucleotides comprise 10 or more chiral internucleotidic linkages. In some embodiments, provided oligonucleotides comprise 15 or more chiral internucleotidic linkages. In some embodiments, provided oligonucleotides comprise 20 or more chiral internucleotidic linkages. In some embodiments, provided oligonucleotides comprise 25 or more chiral internucleotidic linkages. In some embodiments, provided oligonucleotides comprise 30 or more chiral internucleotidic linkages.

[0814] Provided oligonucleotides can comprise various number of achiral internucleotidic linkages. In some embodiments, provided oligonucleotides comprise no achiral internucleotidic linkages. In some embodiments, provided oligonucleotides comprise one achiral internucleotidic linkage. In some embodiments, provided oligonucleotides comprise 2 or more achiral internucleotidic linkages. In some embodiments, provided oligonucleotides comprise 3 or more achiral internucleotidic linkages. In some embodiments, provided oligonucleotides comprise 4 or more achiral internucleotidic linkages. In some embodiments, provided oligonucleotides comprise 5 or more achiral internucleotidic linkages. In some embodiments, provided oligonucleotides comprise 6 or more achiral internucleotidic linkages. In some embodiments, provided oligonucleotides comprise 7 or more achiral internucleotidic linkages. In some embodiments, provided oligonucleotides comprise 8 or more achiral internucleotidic linkages. In some embodiments, provided oligonucleotides comprise 9 or more achiral internucleotidic linkages. In some embodiments, provided oligonucleotides comprise 10 or more achiral internucleotidic linkages. In some embodiments, provided oligonucleotides comprise 15 or more achiral internucleotidic linkages. In some embodiments, provided oligonucleotides comprise 20 or more achiral internucleotidic linkages. In some embodiments, provided oligonucleotides comprise 25 or more achiral internucleotidic linkages. In some embodiments, provided oligonucleotides comprise 30 or more achiral internucleotidic linkages.

[0815] In some embodiments, 5% or more of the sugar moieties of provided oligonucleotides are modified. In some embodiments, 10% or more of the sugar moieties of provided oligonucleotides are modified. In some embodiments, 15% or more of the sugar moieties of provided oligonucleotides are modified. In some embodiments, 20% or more of the sugar moieties of provided oligonucleotides are modified. In some embodiments, 25% or more of the sugar moieties of provided oligonucleotides are modified. In some embodiments, 30% or more of the sugar moieties of provided oligonucleotides are modified. In some embodiments, 35% or more of the sugar moieties of provided oligonucleotides are modified. In some embodiments, 40% or more of the sugar moieties of provided oligonucleotides are modified. In some embodiments, 45% or more of the sugar moieties of provided oligonucleotides are modified. In some embodiments, 50% or more of the sugar moieties of provided oligonucleotides are modified. In some embodiments, 55% or more of the sugar moieties of provided oligonucleotides are modified. In some embodiments, 60% or more of the sugar moieties of provided oligonucleotides are modified. In some embodiments, 65% or more of the sugar moieties of provided oligonucleotides are modified. In some embodiments, 70% or more of the sugar moieties of provided oligonucleotides are modified. In some embodiments, 75% or more of the sugar moieties of provided oligonucleotides are modified. In some embodiments, 80% or more of the sugar moieties of provided oligonucleotides are modified. In some embodiments, 85% or more of the sugar moieties of provided oligonucleotides are modified. In some embodiments, 90% or more of the sugar moieties of provided oligonucleotides are modified. In some embodiments, 95% or more of the sugar moieties of provided oligonucleotides are modified. In some embodiments, each sugar moiety of provided oligonucleotides is modified.

[0816] In some embodiments, provided oligonucleotides comprise one or more 2′-F. In some embodiments, provided oligonucleotides comprise two or more 2′-F. In some embodiments, provided oligonucleotides comprise three or more 2′-F. In some embodiments, provided oligonucleotides comprise four or more 2′-F. In some embodiments, provided oligonucleotides comprise five or more 2′-F. In some embodiments, provided oligonucleotides comprise six or more 2′-F. In some embodiments, provided oligonucleotides comprise seven or more 2′-F. In some embodiments, provided oligonucleotides comprise eight or more 2′-F. In some embodiments, provided oligonucleotides comprise nine or more 2′-F. In some embodiments, provided oligonucleotides comprise ten or more 2′-F. In some embodiments, provided oligonucleotides comprise 11 or more 2′-F. In some embodiments, provided oligonucleotides comprise 12 or more 2′-F. In some embodiments, provided oligonucleotides comprise 13 or more 2′-F. In some embodiments, provided oligonucleotides comprise 14 or more 2′-F. In some embodiments, provided oligonucleotides comprise 15 or more 2′-F. In some embodiments, provided oligonucleotides comprise 16 or more 2′-F. In some embodiments, provided oligonucleotides comprise 17 or more 2′-F. In some embodiments, provided oligonucleotides comprise 18 or more 2′-F. In some embodiments, provided oligonucleotides comprise 19 or more 2′-F. In some embodiments, provided oligonucleotides comprise 20 or more 2′-F. In some embodiments, provided oligonucleotides comprise 21 or more 2′-F. In some embodiments, provided oligonucleotides comprise 22 or more 2′-F. In some embodiments, provided oligonucleotides comprise 23 or more 2′-F. In some embodiments, provided oligonucleotides comprise 24 or more 2′-F. In some embodiments, provided oligonucleotides comprise 25 or more 2′-F. In some embodiments, provided oligonucleotides comprise 30 or more 2′-F. In some embodiments, provided oligonucleotides comprise 35 or more 2′-F.

[0817] In some embodiments, provided oligonucleotides comprise one 2′-F. In some embodiments, provided oligonucleotides comprise two 2′-F. In some embodiments, provided oligonucleotides comprise three 2′-F. In some embodiments, provided oligonucleotides comprise four 2′-F. In some embodiments, provided oligonucleotides comprise five 2′-F. In some embodiments, provided oligonucleotides comprise six 2′-F. In some embodiments, provided oligonucleotides comprise seven 2′-F. In some embodiments, provided oligonucleotides comprise eight 2′-F. In some embodiments, provided oligonucleotides comprise nine 2′-F. In some embodiments, provided oligonucleotides comprise ten 2′-F. In some embodiments, provided oligonucleotides comprise 11 2′-F. In some embodiments, provided oligonucleotides comprise 12 2′-F. In some embodiments, provided oligonucleotides comprise 13 2′-F. In some embodiments, provided oligonucleotides comprise 14 2′-F. In some embodiments, provided oligonucleotides comprise 15 2′-F. In some embodiments, provided oligonucleotides comprise 16 2′-F. In some embodiments, provided oligonucleotides comprise 17 2′-F. In some embodiments, provided oligonucleotides comprise 18 2′-F. In some embodiments, provided oligonucleotides comprise 19 2′-F. In some embodiments, provided oligonucleotides comprise 20 2′-F. In some embodiments, provided oligonucleotides comprise 21 2′-F. In some embodiments, provided oligonucleotides comprise 22 2′-F. In some embodiments, provided oligonucleotides comprise 23 2′-F. In some embodiments, provided oligonucleotides comprise 24 2′-F. In some embodiments, provided oligonucleotides comprise 25 2′-F. In some embodiments, provided oligonucleotides comprise 30 2′-F. In some embodiments, provided oligonucleotides comprise 35 2′-F.

[0818] In some embodiments, provided oligonucleotides comprise one or more consecutive 2′-F. In some embodiments, provided oligonucleotides comprise two or more consecutive 2′-F. In some embodiments, provided oligonucleotides comprise three or more consecutive 2′-F. In some embodiments, provided oligonucleotides comprise four or more consecutive 2′-F. In some embodiments, provided oligonucleotides comprise five or more consecutive 2′-F. In some embodiments, provided oligonucleotides comprise six or more consecutive 2′-F. In some embodiments, provided oligonucleotides comprise seven or more consecutive 2′-F. In some embodiments, provided oligonucleotides comprise eight or more consecutive 2′-F. In some embodiments, provided oligonucleotides comprise nine or more consecutive 2′-F. In some embodiments, provided oligonucleotides comprise ten or more consecutive 2′-F. In some embodiments, provided oligonucleotides comprise 11 or more consecutive 2′-F. In some embodiments, provided oligonucleotides comprise 12 or more consecutive 2′-F. In some embodiments, provided oligonucleotides comprise 13 or more consecutive 2′-F. In some embodiments, provided oligonucleotides comprise 14 or more consecutive 2′-F. In some embodiments, provided oligonucleotides comprise 15 or more consecutive 2′-F. In some embodiments, provided oligonucleotides comprise 16 or more consecutive 2′-F. In some embodiments, provided oligonucleotides comprise 17 or more consecutive 2′-F. In some embodiments, provided oligonucleotides comprise 18 or more consecutive 2′-F. In some embodiments, provided oligonucleotides comprise 19 or more consecutive 2′-F. In some embodiments, provided oligonucleotides comprise 20 or more consecutive 2′-F. In some embodiments, provided oligonucleotides comprise 21 or more consecutive 2′-F. In some embodiments, provided oligonucleotides comprise 22 or more consecutive 2′-F. In some embodiments, provided oligonucleotides comprise 23 or more consecutive 2′-F. In some embodiments, provided oligonucleotides comprise 24 or more consecutive 2′-F. In some embodiments, provided oligonucleotides comprise 25 or more consecutive 2′-F. In some embodiments, provided oligonucleotides comprise 30 or more consecutive 2′-F. In some embodiments, provided oligonucleotides comprise 35 or more consecutive 2′-F.

[0819] In some embodiments, provided oligonucleotides comprise one consecutive 2′-F. In some embodiments, provided oligonucleotides comprise two consecutive 2′-F. In some embodiments, provided oligonucleotides comprise three consecutive 2′-F. In some embodiments, provided oligonucleotides comprise four consecutive 2′-F. In some embodiments, provided oligonucleotides comprise five consecutive 2′-F. In some embodiments, provided oligonucleotides comprise six consecutive 2′-F. In some embodiments, provided oligonucleotides comprise seven consecutive 2′-F. In some embodiments, provided oligonucleotides comprise eight consecutive 2′-F. In some embodiments, provided oligonucleotides comprise nine consecutive 2′-F. In some embodiments, provided oligonucleotides comprise ten consecutive 2′-F. In some embodiments, provided oligonucleotides comprise 11 consecutive 2′-F. In some embodiments, provided oligonucleotides comprise 12 consecutive 2′-F. In some embodiments, provided oligonucleotides comprise 13 consecutive 2′-F. In some embodiments, provided oligonucleotides comprise 14 consecutive 2′-F. In some embodiments, provided oligonucleotides comprise 15 consecutive 2′-F. In some embodiments, provided oligonucleotides comprise 16 consecutive 2′-F. In some embodiments, provided oligonucleotides comprise 17 consecutive 2′-F. In some embodiments, provided oligonucleotides comprise 18 consecutive 2′-F. In some embodiments, provided oligonucleotides comprise 19 consecutive 2′-F. In some embodiments, provided oligonucleotides comprise 20 consecutive 2′-F. In some embodiments, provided oligonucleotides comprise 21 consecutive 2′-F. In some embodiments, provided oligonucleotides comprise 22 consecutive 2′-F. In some embodiments, provided oligonucleotides comprise 23 consecutive 2′-F. In some embodiments, provided oligonucleotides comprise 24 consecutive 2′-F. In some embodiments, provided oligonucleotides comprise 25 consecutive 2′-F. In some embodiments, provided oligonucleotides comprise 30 consecutive 2′-F. In some embodiments, provided oligonucleotides comprise 35 consecutive 2′-F.

[0820] In some embodiments, a nucleoside comprising a 2′-modification is followed by a modified internucleotidic linkage. In some embodiments, a nucleoside comprising a 2′-modification is preceded by a modified internucleotidic linkage. In some embodiments, a modified internucleotidic linkage is a chiral internucleotidic linkage. In some embodiments, a modified internucleotidic linkage is a phosphorothioate. In some embodiments, a chiral internucleotidic linkage is Sp. In some embodiments, a nucleoside comprising a 2′-modification is followed by an Sp chiral internucleotidic linkage. In some embodiments, a nucleoside comprising a 2′-F is followed by an Sp chiral internucleotidic linkage. In some embodiments, a nucleoside comprising a 2′-modification is preceded by an Sp chiral internucleotidic linkage. In some embodiments, a nucleoside comprising a 2′-F is preceded by an Sp chiral internucleotidic linkage. In some embodiments, a chiral internucleotidic linkage is Rp. In some embodiments, a nucleoside comprising a 2′-modification is followed by an Rp chiral internucleotidic linkage. In some embodiments, a nucleoside comprising a 2′-F is followed by an Rp chiral internucleotidic linkage. In some embodiments, a nucleoside comprising a 2′-modification is preceded by an Rp chiral internucleotidic linkage. In some embodiments, a nucleoside comprising a 2′-F is preceded by an Rp chiral internucleotidic linkage.

[0821] In some embodiments, provided oligonucleotides comprise one or more natural phosphate linkages and one or more modified internucleotidic linkages.

[0822] Provided oligonucleotides can comprise various number of natural phosphate linkages. In some embodiments, provided oligonucleotides comprise no natural phosphate linkages. In some embodiments, provided oligonucleotides comprise one natural phosphate linkage. In some embodiments, provided oligonucleotides comprise 2 or more natural phosphate linkages. In some embodiments, provided oligonucleotides comprise 3 or more natural phosphate linkages. In some embodiments, provided oligonucleotides comprise 4 or more natural phosphate linkages. In some embodiments, provided oligonucleotides comprise 5 or more natural phosphate linkages. In some embodiments, provided oligonucleotides comprise 6 or more natural phosphate linkages. In some embodiments, provided oligonucleotides comprise 7 or more natural phosphate linkages. In some embodiments, provided oligonucleotides comprise 8 or more natural phosphate linkages. In some embodiments, provided oligonucleotides comprise 9 or more natural phosphate linkages. In some embodiments, provided oligonucleotides comprise 10 or more natural phosphate linkages. In some embodiments, provided oligonucleotides comprise 15 or more natural phosphate linkages. In some embodiments, provided oligonucleotides comprise 20 or more natural phosphate linkages. In some embodiments, provided oligonucleotides comprise 25 or more natural phosphate linkages. In some embodiments, provided oligonucleotides comprise 30 or more natural phosphate linkages.

[0823] Provided oligonucleotides can comprise various numbers of consecutive chiral internucleotidic linkages. In some embodiments, provided oligonucleotides comprise no consecutive chiral internucleotidic linkages. In some embodiments, provided oligonucleotides comprise one consecutive chiral internucleotidic linkage. In some embodiments, provided oligonucleotides comprise 2 or more consecutive chiral internucleotidic linkages. In some embodiments, provided oligonucleotides comprise 3 or more consecutive chiral internucleotidic linkages. In some embodiments, provided oligonucleotides comprise 4 or more consecutive chiral internucleotidic linkages. In some embodiments, provided oligonucleotides comprise 5 or more consecutive chiral internucleotidic linkages. In some embodiments, provided oligonucleotides comprise 6 or more consecutive chiral internucleotidic linkages. In some embodiments, provided oligonucleotides comprise 7 or more consecutive chiral internucleotidic linkages. In some embodiments, provided oligonucleotides comprise 8 or more consecutive chiral internucleotidic linkages. In some embodiments, provided oligonucleotides comprise 9 or more consecutive chiral internucleotidic linkages. In some embodiments, provided oligonucleotides comprise 10 or more consecutive chiral internucleotidic linkages. In some embodiments, provided oligonucleotides comprise 15 or more consecutive chiral internucleotidic linkages. In some embodiments, provided oligonucleotides comprise 20 or more consecutive chiral internucleotidic linkages. In some embodiments, provided oligonucleotides comprise 25 or more consecutive chiral internucleotidic linkages. In some embodiments, provided oligonucleotides comprise 30 or more consecutive chiral internucleotidic linkages.

[0824] Provided oligonucleotides can comprise various numbers of consecutive achiral internucleotidic linkages. In some embodiments, provided oligonucleotides comprise no consecutive achiral internucleotidic linkages. In some embodiments, provided oligonucleotides comprise one consecutive achiral internucleotidic linkage. In some embodiments, provided oligonucleotides comprise 2 or more consecutive achiral internucleotidic linkages. In some embodiments, provided oligonucleotides comprise 3 or more consecutive achiral internucleotidic linkages. In some embodiments, provided oligonucleotides comprise 4 or more consecutive achiral internucleotidic linkages. In some embodiments, provided oligonucleotides comprise 5 or more consecutive achiral internucleotidic linkages. In some embodiments, provided oligonucleotides comprise 6 or more consecutive achiral internucleotidic linkages. In some embodiments, provided oligonucleotides comprise 7 or more consecutive achiral internucleotidic linkages. In some embodiments, provided oligonucleotides comprise 8 or more consecutive achiral internucleotidic linkages. In some embodiments, provided oligonucleotides comprise 9 or more consecutive achiral internucleotidic linkages. In some embodiments, provided oligonucleotides comprise 10 or more consecutive achiral internucleotidic linkages. In some embodiments, provided oligonucleotides comprise 15 or more consecutive achiral internucleotidic linkages. In some embodiments, provided oligonucleotides comprise 20 or more consecutive achiral internucleotidic linkages. In some embodiments, provided oligonucleotides comprise 25 or more consecutive achiral internucleotidic linkages. In some embodiments, provided oligonucleotides comprise 30 or more consecutive achiral internucleotidic linkages.

[0825] In some embodiments, 5% or more of the internucleotidic linkages of provided oligonucleotides are natural phosphate linkages. In some embodiments, 10% or more of the internucleotidic linkages of provided oligonucleotides are natural phosphate linkages. In some embodiments, 15% or more of the internucleotidic linkages of provided oligonucleotides are natural phosphate linkages. In some embodiments, 20% or more of the internucleotidic linkages of provided oligonucleotides are natural phosphate linkages. In some embodiments, 25% or more of the internucleotidic linkages of provided oligonucleotides are natural phosphate linkages. In some embodiments, 30% or more of the internucleotidic linkages of provided oligonucleotides are natural phosphate linkages. In some embodiments, 35% or more of the internucleotidic linkages of provided oligonucleotides are natural phosphate linkages. In some embodiments, 40% or more of the internucleotidic linkages of provided oligonucleotides are natural phosphate linkages. In some embodiments, 45% or more of the internucleotidic linkages of provided oligonucleotides are natural phosphate linkages. In some embodiments, 50% or more of the internucleotidic linkages of provided oligonucleotides are natural phosphate linkages. In some embodiments, 55% or more of the internucleotidic linkages of provided oligonucleotides are natural phosphate linkages. In some embodiments, 60% or more of the internucleotidic linkages of provided oligonucleotides are natural phosphate linkages. In some embodiments, 65% or more of the internucleotidic linkages of provided oligonucleotides are natural phosphate linkages. In some embodiments, 70% or more of the internucleotidic linkages of provided oligonucleotides are natural phosphate linkages. In some embodiments, 75% or more of the internucleotidic linkages of provided oligonucleotides are natural phosphate linkages. In some embodiments, 80% or more of the internucleotidic linkages of provided oligonucleotides are natural phosphate linkages. In some embodiments, 85% or more of the internucleotidic linkages of provided oligonucleotides are natural phosphate linkages. In some embodiments, 90% or more of the internucleotidic linkages of provided oligonucleotides are natural phosphate linkages. In some embodiments, 95% or more of the internucleotidic linkages of provided oligonucleotides are natural phosphate linkages.

[0826] In some embodiments, provided oligonucleotides comprise no more than about 25 consecutive unmodified sugar moieties. In some embodiments, provided oligonucleotides comprise no more than about 20 consecutive unmodified sugar moieties. In some embodiments, provided oligonucleotides comprise no more than about 15 consecutive unmodified sugar moieties. In some embodiments, provided oligonucleotides comprise no more than about 10 consecutive unmodified sugar moieties. In some embodiments, provided oligonucleotides comprise no more than about 9 consecutive unmodified sugar moieties. In some embodiments, provided oligonucleotides comprise no more than about 8 consecutive unmodified sugar moieties. In some embodiments, provided oligonucleotides comprise no more than about 7 consecutive unmodified sugar moieties. In some embodiments, provided oligonucleotides comprise no more than about 6 consecutive unmodified sugar moieties. In some embodiments, provided oligonucleotides comprise no more than about 5 consecutive unmodified sugar moieties. In some embodiments, provided oligonucleotides comprise no more than about 4 consecutive unmodified sugar moieties. In some embodiments, provided oligonucleotides comprise no more than about 3 consecutive unmodified sugar moieties. In some embodiments, provided oligonucleotides comprise no more than about 2 consecutive unmodified sugar moieties. In some embodiments, provided oligonucleotides comprise no more than about 25 unmodified sugar moieties. In some embodiments, provided oligonucleotides comprise no more than about 20 unmodified sugar moieties. In some embodiments, provided oligonucleotides comprise no more than about 15 unmodified sugar moieties. In some embodiments, provided oligonucleotides comprise no more than about 10 unmodified sugar moieties. In some embodiments, provided oligonucleotides comprise no more than about 5 unmodified sugar moieties.

[0827] In some embodiments, provided oligonucleotides comprise no more than about 95% unmodified sugar moieties. In some embodiments, provided oligonucleotides comprise no more than about 90% unmodified sugar moieties. In some embodiments, provided oligonucleotides comprise no more than about 85% unmodified sugar moieties. In some embodiments, provided oligonucleotides comprise no more than about 80% unmodified sugar moieties. In some embodiments, provided oligonucleotides comprise no more than about 70% unmodified sugar moieties. In some embodiments, provided oligonucleotides comprise no more than about 60% unmodified sugar moieties. In some embodiments, provided oligonucleotides comprise no more than about 50% unmodified sugar moieties. In some embodiments, provided oligonucleotides comprise no more than about 40% unmodified sugar moieties. In some embodiments, provided oligonucleotides comprise no more than about 30% unmodified sugar moieties. In some embodiments, provided oligonucleotides comprise no more than about 20% unmodified sugar moieties. In some embodiments, provided oligonucleotides comprise no more than about 10% unmodified sugar moieties. In some embodiments, provided oligonucleotides comprise no more than about 5% unmodified sugar moieties. In some embodiments, provided oligonucleotides comprise no more than about 15 consecutive unmodified sugar moieties. In some embodiments, provided oligonucleotides comprise no more than about 10 consecutive unmodified sugar moieties. In some embodiments, provided oligonucleotides comprise no more than about 9 consecutive unmodified sugar moieties. In some embodiments, provided oligonucleotides comprise no more than about 8 consecutive unmodified sugar moieties. In some embodiments, provided oligonucleotides comprise no more than about 7 consecutive unmodified sugar moieties. In some embodiments, provided oligonucleotides comprise no more than about 6 consecutive unmodified sugar moieties. In some embodiments, provided oligonucleotides comprise no more than about 5 consecutive unmodified sugar moieties. In some embodiments, provided oligonucleotides comprise no more than about 4 consecutive unmodified sugar moieties. In some embodiments, provided oligonucleotides comprise no more than about 3 consecutive unmodified sugar moieties. In some embodiments, provided oligonucleotides comprise no more than about 2 consecutive unmodified sugar moieties. In some embodiments, provided oligonucleotides comprise no more than about 25 unmodified sugar moieties. In some embodiments, provided oligonucleotides comprise no more than about 20 unmodified sugar moieties. In some embodiments, provided oligonucleotides comprise no more than about 15 unmodified sugar moieties. In some embodiments, provided oligonucleotides comprise no more than about 10 unmodified sugar moieties. In some embodiments, provided oligonucleotides comprise no more than about 5 unmodified sugar moieties.

[0828] In some embodiments, provided oligonucleotides comprise no more than about 95% unmodified sugar moieties. In some embodiments, provided oligonucleotides comprise no more than about 90% unmodified sugar moieties. In some embodiments, provided oligonucleotides comprise no more than about 85% unmodified sugar moieties. In some embodiments, provided oligonucleotides comprise no more than about 80% unmodified sugar moieties. In some embodiments, provided oligonucleotides comprise no more than about 70% unmodified sugar moieties. In some embodiments, provided oligonucleotides comprise no more than about 60% unmodified sugar moieties. In some embodiments, provided oligonucleotides comprise no more than about 50% unmodified sugar moieties. In some embodiments, provided oligonucleotides comprise no more than about 40% unmodified sugar moieties. In some embodiments, provided oligonucleotides comprise no more than about 30% unmodified sugar moieties. In some embodiments, provided oligonucleotides comprise no more than about 20% unmodified sugar moieties. In some embodiments, provided oligonucleotides comprise no more than about 10% unmodified sugar moieties. In some embodiments, provided oligonucleotides comprise no more than about 5% unmodified sugar moieties. In some embodiments, each sugar moiety of the oligonucleotides of the first plurality is independently modified.

[0829] In some embodiments, provided oligonucleotides comprise two or more modified internucleotidic linkages. In some embodiments, provided oligonucleotides comprise three or more modified internucleotidic linkages. In some embodiments, provided oligonucleotides comprise four or more modified internucleotidic linkages. In some embodiments, provided oligonucleotides comprise five or more modified internucleotidic linkages. In some embodiments, provided oligonucleotides comprise ten or more modified internucleotidic linkages. In some embodiments, provided oligonucleotides comprise about 15 or more modified internucleotidic linkages. In some embodiments, provided oligonucleotides comprise about 20 or more modified internucleotidic linkages. In some embodiments, provided oligonucleotides comprise about 25 or more modified internucleotidic linkages.

[0830] In some embodiments, about 5% of the internucleotidic linkages in provided oligonucleotides are modified internucleotidic linkages. In some embodiments, about 10% of the internucleotidic linkages in provided oligonucleotides are modified internucleotidic linkages. In some embodiments, about 20% of the internucleotidic linkages in provided oligonucleotides are modified internucleotidic linkages. In some embodiments, about 30% of the internucleotidic linkages in provided oligonucleotides are modified internucleotidic linkages. In some embodiments, about 40% of the internucleotidic linkages in provided oligonucleotides are modified internucleotidic linkages. In some embodiments, about 50% of the internucleotidic linkages in provided oligonucleotides are modified internucleotidic linkages. In some embodiments, about 60% of the internucleotidic linkages in provided oligonucleotides are modified internucleotidic linkages. In some embodiments, about 70% of the internucleotidic linkages in provided oligonucleotides are modified internucleotidic linkages. In some embodiments, about 80% of the internucleotidic linkages in provided oligonucleotides are modified internucleotidic linkages. In some embodiments, about 85% of the internucleotidic linkages in provided oligonucleotides are modified internucleotidic linkages. In some embodiments, about 90% of the internucleotidic linkages in provided oligonucleotides are modified internucleotidic linkages. In some embodiments, about 95% of the internucleotidic linkages in provided oligonucleotides are modified internucleotidic linkages.

[0831] In some embodiments, provided oligonucleotides comprise no more than about 25 consecutive natural phosphate linkages. In some embodiments, provided oligonucleotides comprise no more than about 20 consecutive natural phosphate linkages. In some embodiments, provided oligonucleotides comprise no more than about 15 consecutive natural phosphate linkages. In some embodiments, provided oligonucleotides comprise no more than about 10 consecutive natural phosphate linkages. In some embodiments, provided oligonucleotides comprise no more than about 9 consecutive natural phosphate linkages. In some embodiments, provided oligonucleotides comprise no more than about 8 consecutive natural phosphate linkages. In some embodiments, provided oligonucleotides comprise no more than about 7 consecutive natural phosphate linkages. In some embodiments, provided oligonucleotides comprise no more than about 6 consecutive natural phosphate linkages. In some embodiments, provided oligonucleotides comprise no more than about 5 consecutive natural phosphate linkages. In some embodiments, provided oligonucleotides comprise no more than about 4 consecutive natural phosphate linkages. In some embodiments, provided oligonucleotides comprise no more than about 3 consecutive natural phosphate linkages. In some embodiments, provided oligonucleotides comprise no more than about 2 consecutive natural phosphate linkages. In some embodiments, provided oligonucleotides comprise no more than about 25 natural phosphate linkages. In some embodiments, provided oligonucleotides comprise no more than about 20 natural phosphate linkages. In some embodiments, provided oligonucleotides comprise no more than about 15 natural phosphate linkages. In some embodiments, provided oligonucleotides comprise no more than about 10 natural phosphate linkages. In some embodiments, provided oligonucleotides comprise no more than about 5 natural phosphate linkages. In some embodiments, provided oligonucleotides comprise no more than about 95% natural phosphate linkages. In some embodiments, provided oligonucleotides comprise no more than about 90% natural phosphate linkages. In some embodiments, provided oligonucleotides comprise no more than about 85% natural phosphate linkages. In some embodiments, provided oligonucleotides comprise no more than about 80% natural phosphate linkages. In some embodiments, provided oligonucleotides comprise no more than about 70% natural phosphate linkages. In some embodiments, provided oligonucleotides comprise no more than about 60% natural phosphate linkages. In some embodiments, provided oligonucleotides comprise no more than about 50% natural phosphate linkages. In some embodiments, provided oligonucleotides comprise no more than about 40% natural phosphate linkages. In some embodiments, provided oligonucleotides comprise no more than about 30% natural phosphate linkages. In some embodiments, provided oligonucleotides comprise no more than about 20% natural phosphate linkages. In some embodiments, provided oligonucleotides comprise no more than about 10% natural phosphate linkages. In some embodiments, provided oligonucleotides comprise no more than about 5% natural phosphate linkages.

[0832] In some embodiments, provided oligonucleotides comprise no DNA nucleotide.

[0833] A DNA nucleotide is a nucleotide in which the sugar moiety is an unmodified DNA sugar moiety, and the internucleotidic linkage is a natural phosphate linkage. In some embodiments, provided oligonucleotides comprise no more than 2 DNA nucleotides. In some embodiments, provided oligonucleotides comprise no more than 3 DNA nucleotides. In some embodiments, provided oligonucleotides comprise no more than 4 DNA nucleotides. In some embodiments, provided oligonucleotides comprise no more than 5 DNA nucleotides. In some embodiments, provided oligonucleotides comprise no more than 6 DNA nucleotides. In some embodiments, provided oligonucleotides comprise no more than 7 DNA nucleotides. In some embodiments, provided oligonucleotides comprise no more than 8 DNA nucleotides. In some embodiments, provided oligonucleotides comprise no more than 9 DNA nucleotides. In some embodiments, provided oligonucleotides comprise no more than 10 DNA nucleotides. In some embodiments, provided oligonucleotides comprise no more than 11 DNA nucleotides. In some embodiments, provided oligonucleotides comprise no more than 12 DNA nucleotides. In some embodiments, provided oligonucleotides comprise no more than 13 DNA nucleotides. In some embodiments, provided oligonucleotides comprise no more than 14 DNA nucleotides. In some embodiments, provided oligonucleotides comprise no more than 15 DNA nucleotides. In some embodiments, provided oligonucleotides comprise no more than 20 DNA nucleotides. In some embodiments, provided oligonucleotides comprise no more than 25 DNA nucleotides. In some embodiments, provided oligonucleotides comprise no more than 30 DNA nucleotides.

[0834] In some embodiments, provided oligonucleotides comprise no more than 2 consecutive DNA nucleotides. In some embodiments, provided oligonucleotides comprise no more than 3 consecutive DNA nucleotides. In some embodiments, provided oligonucleotides comprise no more than 4 consecutive DNA nucleotides. In some embodiments, provided oligonucleotides comprise no more than 5 consecutive DNA nucleotides. In some embodiments, provided oligonucleotides comprise no more than 6 consecutive DNA nucleotides. In some embodiments, provided oligonucleotides comprise no more than 7 consecutive DNA nucleotides. In some embodiments, provided oligonucleotides comprise no more than 8 consecutive DNA nucleotides. In some embodiments, provided oligonucleotides comprise no more than 9 consecutive DNA nucleotides. In some embodiments, provided oligonucleotides comprise no more than 10 consecutive DNA nucleotides. In some embodiments, provided oligonucleotides comprise no more than 11 consecutive DNA nucleotides. In some embodiments, provided oligonucleotides comprise no more than 12 consecutive DNA nucleotides. In some embodiments, provided oligonucleotides comprise no more than 13 consecutive DNA nucleotides. In some embodiments, provided oligonucleotides comprise no more than 14 consecutive DNA nucleotides. In some embodiments, provided oligonucleotides comprise no more than 15 consecutive DNA nucleotides. In some embodiments, provided oligonucleotides comprise no more than 20 consecutive DNA nucleotides. In some embodiments, provided oligonucleotides comprise no more than 25 consecutive DNA nucleotides. In some embodiments, provided oligonucleotides comprise no more than 30 consecutive DNA nucleotides.

[0835] In some embodiments, compared to a reference condition, provided oligonucleotide compositions are surprisingly effective. In some embodiments, desired biological effects (e.g., as measured by increased levels of desired mRNA, proteins, etc., decreased levels of undesired mRNA, proteins, etc., delivery to target locations, etc.) can be enhanced by more than 5, 10, 15, 20, 25, 30, 40, 50, or 100 folds. In some embodiments, a change is measured by increase of a desired mRNA level compared to a reference condition. In some embodiments, a change is measured by decrease of an undesired mRNA level compared to a reference condition. In some embodiments, a change is measured by increase of delivery to target locations compared to a reference condition. In some embodiments, a reference condition is absence of oligonucleotide treatment. In some embodiments, a reference condition is a stereorandom composition of oligonucleotides having the same base sequence and chemical modifications.

[0836] In some embodiments, a desired biological effect is enhanced by more than 2 folds. In some embodiments, a desired biological effect is enhanced by more than 3 folds. In some embodiments, a desired biological effect is enhanced by more than 4 folds. In some embodiments, a desired biological effect is enhanced by more than 5 folds. In some embodiments, a desired biological effect is enhanced by more than 6 folds. In some embodiments, a desired biological effect is enhanced by more than 7 folds. In some embodiments, a desired biological effect is enhanced by more than 8 folds. In some embodiments, a desired biological effect is enhanced by more than 9 folds. In some embodiments, a desired biological effect is enhanced by more than 10 folds. In some embodiments, a desired biological effect is enhanced by more than 11 folds. In some embodiments, a desired biological effect is enhanced by more than 12 folds. In some embodiments, a desired biological effect is enhanced by more than 13 folds. In some embodiments, a desired biological effect is enhanced by more than 14 folds. In some embodiments, a desired biological effect is enhanced by more than 15 folds. In some embodiments, a desired biological effect is enhanced by more than 20 folds. In some embodiments, a desired biological effect is enhanced by more than 25 folds. In some embodiments, a desired biological effect is enhanced by more than 30 folds. In some embodiments, a desired biological effect is enhanced by more than 35 folds. In some embodiments, a desired biological effect is enhanced by more than 40 folds. In some embodiments, a desired biological effect is enhanced by more than 45 folds. In some embodiments, a desired biological effect is enhanced by more than 50 folds. In some embodiments, a desired biological effect is enhanced by more than 60 folds. In some embodiments, a desired biological effect is enhanced by more than 70 folds. In some embodiments, a desired biological effect is enhanced by more than 80 folds. In some embodiments, a desired biological effect is enhanced by more than 90 folds. In some embodiments, a desired biological effect is enhanced by more than 100 folds. In some embodiments, a desired biological effect is enhanced by more than 200 folds. In some embodiments, a desired biological effect is enhanced by more than 500 folds.

[0837] In some embodiments, provided oligonucleotides comprise two wing and one core regions. In some embodiments, provided oligonucleotides comprises a 5′-wing-core-wing-3′ structure. In some embodiments, provided oligonucleotides are of a 5′-wing-core-wing-3′ gapmer structure. In some embodiments, the two wing regions are identical. In some embodiments, the two wing regions are different. In some embodiments, the two wing regions are identical in chemical modifications. In some embodiments, the two wing regions are identical in 2′-modifications. In some embodiments, the two wing regions are identical in internucleotidic linkage modifications. In some embodiments, the two wing regions are identical in patterns of backbone chiral centers. In some embodiments, the two wing regions are identical in pattern of backbone linkages. In some embodiments, the two wing regions are identical in pattern of backbone linkage types. In some embodiments, the two wing regions are identical in pattern of backbone phosphorus modifications.

[0838] In some embodiments, provided oligonucleotides comprise one wing and one core regions. In some embodiments, provided oligonucleotides comprises a 5′-wing-core-3′ hemimer structure. In some embodiments, provided oligonucleotides are of a 5′-wing-core-3′ hemimer structure. In some embodiments, provided oligonucleotides comprises a 5′-core-wing-3′ hemimer structure. In some embodiments, provided oligonucleotides are of a 5′-core-wing-3′ hemimer structure.

[0839] A wing region can be differentiated from a core region in that a wing region contains a different structure feature than a core region. For example, in some embodiments, a wing region differs from a core region in that they have different sugar modifications, base modifications, internucleotidic linkages, internucleotidic linkage stereochemistry, etc. In some embodiments, a wing region differs from a core region in that they have different 2′-modifications of the sugars.

[0840] In some embodiments, an internucleotidic linkage between a wing region and a core region is considered part of the wing region. In some embodiments, an internucleotidic linkage between a 5′-wing region and a core region is considered part of the wing region. In some embodiments, an internucleotidic linkage between a 3′-wing region and a core region is considered part of the wing region. In some embodiments, an internucleotidic linkage between a wing region and a core region is considered part of the core region. In some embodiments, an internucleotidic linkage between a 5′-wing region and a core region is considered part of the core region. In some embodiments, an internucleotidic linkage between a 3′-wing region and a core region is considered part of the core region.

[0841] In some embodiments, an internucleotidic linkage between a wing region and a core region is considered part of the wing region. In some embodiments, an internucleotidic linkage between a 5′-wing region and a core region is considered part of the wing region. In some embodiments, an internucleotidic linkage between a 3′-wing region and a core region is considered part of the wing region. In some embodiments, an internucleotidic linkage between a wing region and a core region is considered part of the core region. In some embodiments, an internucleotidic linkage between a 5′-wing region and a core region is considered part of the core region. In some embodiments, an internucleotidic linkage between a 3′-wing region and a core region is considered part of the core region.

[0842] In some embodiments, a wing region comprises 2 or more nucleosides. In some embodiments, a wing region comprises 3 or more nucleosides. In some embodiments, a wing region comprises 4 or more nucleosides. In some embodiments, a wing region comprises 5 or more nucleosides. In some embodiments, a wing region comprises 6 or more nucleosides. In some embodiments, a wing region comprises 7 or more nucleosides. In some embodiments, a wing region comprises 8 or more nucleosides. In some embodiments, a wing region comprises 9 or more nucleosides. In some embodiments, a wing region comprises 10 or more nucleosides. In some embodiments, a wing region comprises 11 or more nucleosides. In some embodiments, a wing region comprises 12 or more nucleosides. In some embodiments, a wing region comprises 13 or more nucleosides. In some embodiments, a wing region comprises 14 or more nucleosides. In some embodiments, a wing region comprises 15 or more nucleosides.

[0843] In some embodiments, a wing region comprises 2 or more modified internucleotidic linkages. In some embodiments, a wing region comprises 3 or more modified internucleotidic linkages. In some embodiments, a wing region comprises 4 or more modified internucleotidic linkages. In some embodiments, a wing region comprises 5 or more modified internucleotidic linkages. In some embodiments, a wing region comprises 6 or more modified internucleotidic linkages. In some embodiments, a wing region comprises 7 or more modified internucleotidic linkages. In some embodiments, a wing region comprises 8 or more modified internucleotidic linkages. In some embodiments, a wing region comprises 9 or more modified internucleotidic linkages. In some embodiments, a wing region comprises 10 or more modified internucleotidic linkages. In some embodiments, a wing region comprises 11 or more modified internucleotidic linkages. In some embodiments, a wing region comprises 12 or more modified internucleotidic linkages. In some embodiments, a wing region comprises 13 or more modified internucleotidic linkages. In some embodiments, a wing region comprises 14 or more modified internucleotidic linkages. In some embodiments, a wing region comprises 15 or more modified internucleotidic linkages.

[0844] In some embodiments, a chiral internucleotidic linkage or a modified internucleotidic linkage has the structure of formula I. In some embodiments, a chiral internucleotidic linkage or a modified internucleotidic linkage is phosphorothioate. In some embodiments, each chiral internucleotidic linkage or a modified internucleotidic linkage independently has the structure of formula I. In some embodiments, each chiral internucleotidic linkage or a modified internucleotidic linkage is phosphorothioate.

[0845] In some embodiments, a wing region comprises 2 or more consecutive modified internucleotidic linkages. In some embodiments, a wing region comprises 3 or more consecutive modified internucleotidic linkages. In some embodiments, a wing region comprises 4 or more consecutive modified internucleotidic linkages. In some embodiments, a wing region comprises 5 or more consecutive modified internucleotidic linkages. In some embodiments, a wing region comprises 6 or more consecutive modified internucleotidic linkages. In some embodiments, a wing region comprises 7 or more consecutive modified internucleotidic linkages. In some embodiments, a wing region comprises 8 or more consecutive modified internucleotidic linkages. In some embodiments, a wing region comprises 9 or more consecutive modified internucleotidic linkages. In some embodiments, a wing region comprises 10 or more consecutive modified internucleotidic linkages. In some embodiments, a wing region comprises 11 or more consecutive modified internucleotidic linkages. In some embodiments, a wing region comprises 12 or more consecutive modified internucleotidic linkages. In some embodiments, a wing region comprises 13 or more consecutive modified internucleotidic linkages. In some embodiments, a wing region comprises 14 or more consecutive modified internucleotidic linkages. In some embodiments, a wing region comprises 15 or more consecutive modified internucleotidic linkages. In some embodiments, each internucleotidic linkage in a wing region is independently a modified internucleotidic linkage.

[0846] In some embodiments, 5% or more of the internucleotidic linkages of provided oligonucleotides are modified internucleotidic linkages. In some embodiments, 10% or more of the internucleotidic linkages of provided oligonucleotides are modified internucleotidic linkages. In some embodiments, 15% or more of the internucleotidic linkages of provided oligonucleotides are modified internucleotidic linkages. In some embodiments, 20% or more of the internucleotidic linkages of provided oligonucleotides are modified internucleotidic linkages. In some embodiments, 25% or more of the internucleotidic linkages of provided oligonucleotides are modified internucleotidic linkages. In some embodiments, 30% or more of the internucleotidic linkages of provided oligonucleotides are modified internucleotidic linkages. In some embodiments, 35% or more of the internucleotidic linkages of provided oligonucleotides are modified internucleotidic linkages. In some embodiments, 40% or more of the internucleotidic linkages of provided oligonucleotides are modified internucleotidic linkages. In some embodiments, 45% or more of the internucleotidic linkages of a wing region are modified internucleotidic linkages. In some embodiments, 50% or more of the internucleotidic linkages of a wing region are modified internucleotidic linkages. In some embodiments, 55% or more of the internucleotidic linkages of a wing region are modified internucleotidic linkages. In some embodiments, 60% or more of the internucleotidic linkages of a wing region are modified internucleotidic linkages. In some embodiments, 65% or more of the internucleotidic linkages of a wing region are modified internucleotidic linkages. In some embodiments, 70% or more of the internucleotidic linkages of a wing region are modified internucleotidic linkages. In some embodiments, 75% or more of the internucleotidic linkages of a wing region are modified internucleotidic linkages. In some embodiments, 80% or more of the internucleotidic linkages of a wing region are modified internucleotidic linkages. In some embodiments, 85% or more of the internucleotidic linkages of a wing region are modified internucleotidic linkages. In some embodiments, 90% or more of the internucleotidic linkages of a wing region are modified internucleotidic linkages. In some embodiments, 95% or more of the internucleotidic linkages of a wing region are modified internucleotidic linkages. In some embodiments, each internucleotidic linkage of a wing region is a modified internucleotidic linkage.

[0847] In some embodiments, a wing region comprises 2 or more natural phosphate linkages. In some embodiments, a wing region comprises 3 or more natural phosphate linkages. In some embodiments, a wing region comprises 4 or more natural phosphate linkages. In some embodiments, a wing region comprises 5 or more natural phosphate linkages. In some embodiments, a wing region comprises 6 or more natural phosphate linkages. In some embodiments, a wing region comprises 7 or more natural phosphate linkages. In some embodiments, a wing region comprises 8 or more natural phosphate linkages. In some embodiments, a wing region comprises 9 or more natural phosphate linkages. In some embodiments, a wing region comprises 10 or more natural phosphate linkages. In some embodiments, a wing region comprises 11 or more natural phosphate linkages. In some embodiments, a wing region comprises 12 or more natural phosphate linkages. In some embodiments, a wing region comprises 13 or more natural phosphate linkages. In some embodiments, a wing region comprises 14 or more natural phosphate linkages. In some embodiments, a wing region comprises 15 or more natural phosphate linkages. In some embodiments, a wing region comprises 2 or more consecutive natural phosphate linkages. In some embodiments, a wing region comprises 3 or more consecutive natural phosphate linkages. In some embodiments, a wing region comprises 4 or more consecutive natural phosphate linkages. In some embodiments, a wing region comprises 5 or more consecutive natural phosphate linkages. In some embodiments, a wing region comprises 6 or more consecutive natural phosphate linkages. In some embodiments, a wing region comprises 7 or more consecutive natural phosphate linkages. In some embodiments, a wing region comprises 8 or more consecutive natural phosphate linkages. In some embodiments, a wing region comprises 9 or more consecutive natural phosphate linkages. In some embodiments, a wing region comprises 10 or more consecutive natural phosphate linkages. In some embodiments, a wing region comprises 11 or more consecutive natural phosphate linkages. In some embodiments, a wing region comprises 12 or more consecutive natural phosphate linkages. In some embodiments, a wing region comprises 13 or more consecutive natural phosphate linkages. In some embodiments, a wing region comprises 14 or more consecutive natural phosphate linkages. In some embodiments, a wing region comprises 15 or more consecutive natural phosphate linkages. In some embodiments, each internucleotidic linkage in a wing region is independently a natural phosphate linkage.

[0848] In some embodiments, 5% or more of the internucleotidic linkages of provided oligonucleotides are natural phosphate linkages. In some embodiments, 10% or more of the internucleotidic linkages of provided oligonucleotides are natural phosphate linkages. In some embodiments, 15% or more of the internucleotidic linkages of provided oligonucleotides are natural phosphate linkages. In some embodiments, 20% or more of the internucleotidic linkages of provided oligonucleotides are natural phosphate linkages. In some embodiments, 25% or more of the internucleotidic linkages of provided oligonucleotides are natural phosphate linkages. In some embodiments, 30% or more of the internucleotidic linkages of provided oligonucleotides are natural phosphate linkages. In some embodiments, 35% or more of the internucleotidic linkages of provided oligonucleotides are natural phosphate linkages. In some embodiments, 40% or more of the internucleotidic linkages of provided oligonucleotides are natural phosphate linkages. In some embodiments, 45% or more of the internucleotidic linkages of a wing region are natural phosphate linkages. In some embodiments, 50% or more of the internucleotidic linkages of a wing region are natural phosphate linkages. In some embodiments, 55% or more of the internucleotidic linkages of a wing region are natural phosphate linkages. In some embodiments, 60% or more of the internucleotidic linkages of a wing region are natural phosphate linkages. In some embodiments, 65% or more of the internucleotidic linkages of a wing region are natural phosphate linkages. In some embodiments, 70% or more of the internucleotidic linkages of a wing region are natural phosphate linkages. In some embodiments, 75% or more of the internucleotidic linkages of a wing region are natural phosphate linkages. In some embodiments, 80% or more of the internucleotidic linkages of a wing region are natural phosphate linkages. In some embodiments, 85% or more of the internucleotidic linkages of a wing region are natural phosphate linkages. In some embodiments, 90% or more of the internucleotidic linkages of a wing region are natural phosphate linkages. In some embodiments, 95% or more of the internucleotidic linkages of a wing region are natural phosphate linkages. In some embodiments, each internucleotidic linkage of a wing region is a natural phosphate linkage.

[0849] In some embodiments, a core region comprises 2 or more modified internucleotidic linkages. In some embodiments, a core region comprises 3 or more modified internucleotidic linkages. In some embodiments, a core region comprises 4 or more modified internucleotidic linkages. In some embodiments, a core region comprises 5 or more modified internucleotidic linkages. In some embodiments, a core region comprises 6 or more modified internucleotidic linkages. In some embodiments, a core region comprises 7 or more modified internucleotidic linkages. In some embodiments, a core region comprises 8 or more modified internucleotidic linkages. In some embodiments, a core region comprises 9 or more modified internucleotidic linkages. In some embodiments, a core region comprises 10 or more modified internucleotidic linkages. In some embodiments, a core region comprises 11 or more modified internucleotidic linkages. In some embodiments, a core region comprises 12 or more modified internucleotidic linkages. In some embodiments, a core region comprises 13 or more modified internucleotidic linkages. In some embodiments, a core region comprises 14 or more modified internucleotidic linkages. In some embodiments, a core region comprises 15 or more modified internucleotidic linkages. In some embodiments, a core region comprises 2 or more consecutive modified internucleotidic linkages. In some embodiments, a core region comprises 3 or more consecutive modified internucleotidic linkages. In some embodiments, a core region comprises 4 or more consecutive modified internucleotidic linkages. In some embodiments, a core region comprises 5 or more consecutive modified internucleotidic linkages. In some embodiments, a core region comprises 6 or more consecutive modified internucleotidic linkages. In some embodiments, a core region comprises 7 or more consecutive modified internucleotidic linkages. In some embodiments, a core region comprises 8 or more consecutive modified internucleotidic linkages. In some embodiments, a core region comprises 9 or more consecutive modified internucleotidic linkages. In some embodiments, a core region comprises 10 or more consecutive modified internucleotidic linkages. In some embodiments, a core region comprises 11 or more consecutive modified internucleotidic linkages. In some embodiments, a core region comprises 12 or more consecutive modified internucleotidic linkages. In some embodiments, a core region comprises 13 or more consecutive modified internucleotidic linkages. In some embodiments, a core region comprises 14 or more consecutive modified internucleotidic linkages. In some embodiments, a core region comprises 15 or more consecutive modified internucleotidic linkages. In some embodiments, each internucleotidic linkage in a core region is independently a modified internucleotidic linkage.

[0850] In some embodiments, 5% or more of the internucleotidic linkages of provided oligonucleotides are modified internucleotidic linkages. In some embodiments, 10% or more of the internucleotidic linkages of provided oligonucleotides are modified internucleotidic linkages. In some embodiments, 15% or more of the internucleotidic linkages of provided oligonucleotides are modified internucleotidic linkages. In some embodiments, 20% or more of the internucleotidic linkages of provided oligonucleotides are modified internucleotidic linkages. In some embodiments, 25% or more of the internucleotidic linkages of provided oligonucleotides are modified internucleotidic linkages. In some embodiments, 30% or more of the internucleotidic linkages of provided oligonucleotides are modified internucleotidic linkages. In some embodiments, 35% or more of the internucleotidic linkages of provided oligonucleotides are modified internucleotidic linkages. In some embodiments, 40% or more of the internucleotidic linkages of provided oligonucleotides are modified internucleotidic linkages. In some embodiments, 45% or more of the internucleotidic linkages of a core region are modified internucleotidic linkages. In some embodiments, 50% or more of the internucleotidic linkages of a core region are modified internucleotidic linkages. In some embodiments, 55% or more of the internucleotidic linkages of a core region are modified internucleotidic linkages. In some embodiments, 60% or more of the internucleotidic linkages of a core region are modified internucleotidic linkages. In some embodiments, 65% or more of the internucleotidic linkages of a core region are modified internucleotidic linkages. In some embodiments, 70% or more of the internucleotidic linkages of a core region are modified internucleotidic linkages. In some embodiments, 75% or more of the internucleotidic linkages of a core region are modified internucleotidic linkages. In some embodiments, 80% or more of the internucleotidic linkages of a core region are modified internucleotidic linkages. In some embodiments, 85% or more of the internucleotidic linkages of a core region are modified internucleotidic linkages. In some embodiments, 90% or more of the internucleotidic linkages of a core region are modified internucleotidic linkages. In some embodiments, 95% or more of the internucleotidic linkages of a core region are modified internucleotidic linkages. In some embodiments, each internucleotidic linkage of a core region is a modified internucleotidic linkage.

[0851] Provided oligonucleotides can comprise various number of modified internucleotidic linkages. In some embodiments, provided oligonucleotides comprise one modified internucleotidic linkage. In some embodiments, provided oligonucleotides comprise 2 or more modified internucleotidic linkages. In some embodiments, provided oligonucleotides comprise 3 or more modified internucleotidic linkages. In some embodiments, provided oligonucleotides comprise 4 or more modified internucleotidic linkages. In some embodiments, provided oligonucleotides comprise 5 or more modified internucleotidic linkages. In some embodiments, provided oligonucleotides comprise 6 or more modified internucleotidic linkages. In some embodiments, provided oligonucleotides comprise 7 or more modified internucleotidic linkages. In some embodiments, provided oligonucleotides comprise 8 or more modified internucleotidic linkages. In some embodiments, provided oligonucleotides comprise 9 or more modified internucleotidic linkages. In some embodiments, provided oligonucleotides comprise 10 or more modified internucleotidic linkages. In some embodiments, provided oligonucleotides comprise 15 or more modified internucleotidic linkages. In some embodiments, provided oligonucleotides comprise 20 or more modified internucleotidic linkages. In some embodiments, provided oligonucleotides comprise 25 or more modified internucleotidic linkages. In some embodiments, provided oligonucleotides comprise 30 or more modified internucleotidic linkages.

[0852] In some embodiments, 5% or more of the internucleotidic linkages of provided oligonucleotides are modified internucleotidic linkages. In some embodiments, 10% or more of the internucleotidic linkages of provided oligonucleotides are modified internucleotidic linkages. In some embodiments, 15% or more of the internucleotidic linkages of provided oligonucleotides are modified internucleotidic linkages. In some embodiments, 20% or more of the internucleotidic linkages of provided oligonucleotides are modified internucleotidic linkages. In some embodiments, 25% or more of the internucleotidic linkages of provided oligonucleotides are modified internucleotidic linkages. In some embodiments, 30% or more of the internucleotidic linkages of provided oligonucleotides are modified internucleotidic linkages. In some embodiments, 35% or more of the internucleotidic linkages of provided oligonucleotides are modified internucleotidic linkages. In some embodiments, 40% or more of the internucleotidic linkages of provided oligonucleotides are modified internucleotidic linkages. In some embodiments, 45% or more of the internucleotidic linkages of provided oligonucleotides are modified internucleotidic linkages. In some embodiments, 50% or more of the internucleotidic linkages of provided oligonucleotides are modified internucleotidic linkages. In some embodiments, 55% or more of the internucleotidic linkages of provided oligonucleotides are modified internucleotidic linkages. In some embodiments, 60% or more of the internucleotidic linkages of provided oligonucleotides are modified internucleotidic linkages. In some embodiments, 65% or more of the internucleotidic linkages of provided oligonucleotides are modified internucleotidic linkages. In some embodiments, 70% or more of the internucleotidic linkages of provided oligonucleotides are modified internucleotidic linkages. In some embodiments, 75% or more of the internucleotidic linkages of provided oligonucleotides are modified internucleotidic linkages. In some embodiments, 80% or more of the internucleotidic linkages of provided oligonucleotides are modified internucleotidic linkages. In some embodiments, 85% or more of the internucleotidic linkages of provided oligonucleotides are modified internucleotidic linkages. In some embodiments, 90% or more of the internucleotidic linkages of provided oligonucleotides are modified internucleotidic linkages. In some embodiments, 95% or more of the internucleotidic linkages of provided oligonucleotides are modified internucleotidic linkages. In some embodiments, each internucleotidic linkage of provided oligonucleotides is a modified internucleotidic linkage.

[0853] In some embodiments, the present disclosure provides a chirally controlled oligonucleotide composition comprising one or more lipids, and a first plurality of oligonucleotides defined by having:
[0854] 1) a common base sequence and length;
[0855] 2) a common pattern of backbone linkages; and
[0856] 3) a common pattern of backbone chiral centers, which composition is a substantially pure preparation of a single oligonucleotide in that a predetermined level of the oligonucleotides in the composition have the common base sequence and length, the common pattern of backbone linkages, and the common pattern of backbone chiral centers;
[0857] wherein the lipids are optionally and independently conjugated to one or more oligonucleotides of the plurality.

[0858] In some embodiments, a common base sequence and length may be referred to as a common base sequence. In some embodiments, oligonucleotides having a common base sequence may have the same pattern of nucleoside modifications, e.g., sugar modifications, base modifications, etc. In some embodiments, a pattern of nucleoside modifications may be represented by a combination of locations and modifications.

[0859] As understood by a person having ordinary skill in the art, a stereorandom or racemic preparation of oligonucleotides is prepared by non-stereoselective and/or low-stereoselective coupling of nucleotide monomers, typically without using any chiral auxiliaries, chiral modification reagents, and/or chiral catalysts. In some embodiments, in a substantially racemic (or chirally uncontrolled) preparation of oligonucleotides, all or most coupling steps are not chirally controlled in that the coupling steps are not specifically conducted to provide enhanced stereoselectivity. An example substantially racemic preparation of oligonucleotides is the preparation of phosphorothioate oligonucleotides through sulfurizing phosphite triesters from commonly used phosphoramidite oligonucleotide synthesis with either tteraethylthiuram disulfide or (TETD) or 3H-1, 2-bensodithiol-3-one 1, 1-dioxide (BDTD), a well-known process in the art. In some embodiments, substantially racemic preparation of oligonucleotides provides substantially racemic oligonucleotide compositions (or chirally uncontrolled oligonucleotide compositions). In some embodiments, at least one coupling of a nucleotide monomer has a diastereoselectivity lower than about 60:40, 70:30, 80:20, 85:15, 90:10, 91:9, 92:8, 97:3, 98:2, or 99:1. In some embodiments, at least two couplings of a nucleotide monomer have a diastereoselectivity lower than about 60:40, 70:30, 80:20, 85:15, 90:10, 91:9, 92:8, 97:3, 98:2, or 99:1. In some embodiments, at least three couplings of a nucleotide monomer have a diastereoselectivity lower than about 60:40, 70:30, 80:20, 85:15, 90:10, 91:9, 92:8, 97:3, 98:2, or 99:1. In some embodiments, at least four couplings of a nucleotide monomer have a diastereoselectivity lower than about 60:40, 70:30, 80:20, 85:15, 90:10, 91:9, 92:8, 97:3, 98:2, or 99:1. In some embodiments, at least five couplings of a nucleotide monomer have a diastereoselectivity lower than about 60:40, 70:30, 80:20, 85:15, 90:10, 91:9, 92:8, 97:3, 98:2, or 99:1. In some embodiments, each coupling of a nucleotide monomer independently has a diastereoselectivity lower than about 60:40, 70:30, 80:20, 85:15, 90:10, 91:9, 92:8, 97:3, 98:2, or 99:1. In some embodiments, in a stereorandom or racemic preparations, at least one internucleotidic linkage has a diastereoselectivity lower than about 60:40, 70:30, 80:20, 85:15, 90:10, 91:9, 92:8, 97:3, 98:2, or 99:1. In some embodiments, at least two internucleotidic linkages have a diastereoselectivity lower than about 60:40, 70:30, 80:20, 85:15, 90:10, 91:9, 92:8, 97:3, 98:2, or 99:1. In some embodiments, at least three internucleotidic linkages have a diastereoselectivity lower than about 60:40, 70:30, 80:20, 85:15, 90:10, 91:9, 92:8, 97:3, 98:2, or 99:1. In some embodiments, at least four internucleotidic linkages have a diastereoselectivity lower than about 60:40, 70:30, 80:20, 85:15, 90:10, 91:9, 92:8, 97:3, 98:2, or 99:1. In some embodiments, at least five internucleotidic linkages have a diastereoselectivity lower than about 60:40, 70:30, 80:20, 85:15, 90:10, 91:9, 92:8, 97:3, 98:2, or 99:1. In some embodiments, each internucleotidic linkage independently has a diastereoselectivity lower than about 60:40, 70:30, 80:20, 85:15, 90:10, 91:9, 92:8, 97:3, 98:2, or 99:1. In some embodiments, a diastereoselectivity is lower than about 60:40. In some embodiments, a diastereoselectivity is lower than about 70:30. In some embodiments, a diastereoselectivity is lower than about 80:20. In some embodiments, a diastereoselectivity is lower than about 90:10. In some embodiments, a diastereoselectivity is lower than about 91:9. In some embodiments, a diastereoselectivity is lower than about 92:8. In some embodiments, a diastereoselectivity is lower than about 93:7. In some embodiments, a diastereoselectivity is lower than about 94:6. In some embodiments, a diastereoselectivity is lower than about 95:5. In some embodiments, a diastereoselectivity is lower than about 96:4. In some embodiments, a diastereoselectivity is lower than about 97:3. In some embodiments, a diastereoselectivity is lower than about 98:2. In some embodiments, a diastereoselectivity is lower than about 99:1. In some embodiments, at least one coupling has a diastereoselectivity lower than about 90:10. In some embodiments, at least two couplings have a diastereoselectivity lower than about 90:10. In some embodiments, at least three couplings have a diastereoselectivity lower than about 90:10. In some embodiments, at least four couplings have a diastereoselectivity lower than about 90:10. In some embodiments, at least five couplings have a diastereoselectivity lower than about 90:10. In some embodiments, each coupling independently has a diastereoselectivity lower than about 90:10. In some embodiments, at least one internucleotidic linkage has a diastereoselectivity lower than about 90:10. In some embodiments, at least two internucleotidic linkages have a diastereoselectivity lower than about 90:10. In some embodiments, at least three internucleotidic linkages have a diastereoselectivity lower than about 90:10. In some embodiments, at least four internucleotidic linkages have a diastereoselectivity lower than about 90:10. In some embodiments, at least five internucleotidic linkages have a diastereoselectivity lower than about 90:10. In some embodiments, each internucleotidic linkage independently has a diastereoselectivity lower than about 90:10.

[0860] As understood by a person having ordinary skill in the art, in some embodiments, diastereoselectivity of a coupling or a linkage can be assessed through the diastereoselectivity of a dimer formation under the same or comparable conditions, wherein the dimer has the same 5′- and 3′-nucleosides and internucleotidic linkage. For example, diastereoselectivity of the underlined coupling or linkage in NNNNNNNG*SGNNNNNNN can be assessed from coupling two G moieties under the same or comparable conditions, e.g., monomers, chiral auxiliaries, solvents, activators, temperatures, etc.

[0861] In some embodiments, oligonucleotides having a common base sequence and length, a common pattern of backbone linkages, and a common pattern of backbone chiral centers have a common pattern of backbone phosphorus modifications and a common pattern of base modifications. In some embodiments, oligonucleotides having a common base sequence and length, a common pattern of backbone linkages, and a common pattern of backbone chiral centers have a common pattern of backbone phosphorus modifications and a common pattern of nucleoside modifications. In some embodiments, oligonucleotides having a common base sequence and length, a common pattern of backbone linkages, and a common pattern of backbone chiral centers have identical structures.

[0862] In some embodiments, oligonucleotides of an oligonucleotide type have a common pattern of backbone phosphorus modifications and a common pattern of sugar modifications. In some embodiments, oligonucleotides of an oligonucleotide type have a common pattern of backbone phosphorus modifications and a common pattern of base modifications. In some embodiments, oligonucleotides of an oligonucleotide type have a common pattern of backbone phosphorus modifications and a common pattern of nucleoside modifications. In some embodiments, oligonucleotides of an oligonucleotide type are identical.

[0863] In some embodiments, a chirally controlled oligonucleotide composition is a substantially pure preparation of an oligonucleotide type in that oligonucleotides in the composition that are not of the oligonucleotide type are impurities form the preparation process of said oligonucleotide type, in some case, after certain purification procedures.

[0864] In some embodiments, at least about 20% of the oligonucleotides in the composition have a common base sequence and length, a common pattern of backbone linkages, and a common pattern of backbone chiral centers. In some embodiments, at least about 25% of the oligonucleotides in the composition have a common base sequence and length, a common pattern of backbone linkages, and a common pattern of backbone chiral centers. In some embodiments, at least about 30% of the oligonucleotides in the composition have a common base sequence and length, a common pattern of backbone linkages, and a common pattern of backbone chiral centers. In some embodiments, at least about 35% of the oligonucleotides in the composition have a common base sequence and length, a common pattern of backbone linkages, and a common pattern of backbone chiral centers. In some embodiments, at least about 40% of the oligonucleotides in the composition have a common base sequence and length, a common pattern of backbone linkages, and a common pattern of backbone chiral centers. In some embodiments, at least about 45% of the oligonucleotides in the composition have a common base sequence and length, a common pattern of backbone linkages, and a common pattern of backbone chiral centers. In some embodiments, at least about 50% of the oligonucleotides in the composition have a common base sequence and length, a common pattern of backbone linkages, and a common pattern of backbone chiral centers. In some embodiments, at least about 55% of the oligonucleotides in the composition have a common base sequence and length, a common pattern of backbone linkages, and a common pattern of backbone chiral centers. In some embodiments, at least about 60% of the oligonucleotides in the composition have a common base sequence and length, a common pattern of backbone linkages, and a common pattern of backbone chiral centers. In some embodiments, at least about 65% of the oligonucleotides in the composition have a common base sequence and length, a common pattern of backbone linkages, and a common pattern of backbone chiral centers. In some embodiments, at least about 70% of the oligonucleotides in the composition have a common base sequence and length, a common pattern of backbone linkages, and a common pattern of backbone chiral centers. In some embodiments, at least about 75% of the oligonucleotides in the composition have a common base sequence and length, a common pattern of backbone linkages, and a common pattern of backbone chiral centers. In some embodiments, at least about 80% of the oligonucleotides in the composition have a common base sequence and length, a common pattern of backbone linkages, and a common pattern of backbone chiral centers. In some embodiments, at least about 85% of the oligonucleotides in the composition have a common base sequence and length, a common pattern of backbone linkages, and a common pattern of backbone chiral centers. In some embodiments, at least about 90% of the oligonucleotides in the composition have a common base sequence and length, a common pattern of backbone linkages, and a common pattern of backbone chiral centers. In some embodiments, at least about 92% of the oligonucleotides in the composition have a common base sequence and length, a common pattern of backbone linkages, and a common pattern of backbone chiral centers. In some embodiments, at least about 94% of the oligonucleotides in the composition have a common base sequence and length, a common pattern of backbone linkages, and a common pattern of backbone chiral centers. In some embodiments, at least about 95% of the oligonucleotides in the composition have a common base sequence and length, a common pattern of backbone linkages, and a common pattern of backbone chiral centers. In some embodiments, at least about 91%, 92%, 93%, 94%, 95%, 96%, 97%, 98%, or 99% of the oligonucleotides in the composition have a common base sequence and length, a common pattern of backbone linkages, and a common pattern of backbone chiral centers. In some embodiments, greater than about 99% of the oligonucleotides in the composition have a common base sequence and length, a common pattern of backbone linkages, and a common pattern of backbone chiral centers. In some embodiments, purity of a chirally controlled oligonucleotide composition of an oligonucleotide can be expressed as the percentage of oligonucleotides in the composition that have a common base sequence and length, a common pattern of backbone linkages, and a common pattern of backbone chiral centers.

[0865] In some embodiments, oligonucleotides having a common base sequence and length, a common pattern of backbone linkages, and a common pattern of backbone chiral centers have a common pattern of backbone phosphorus modifications. In some embodiments, oligonucleotides having a common base sequence and length, a common pattern of backbone linkages, and a common pattern of backbone chiral centers have a common pattern of backbone phosphorus modifications and a common pattern of nucleoside modifications. In some embodiments, oligonucleotides having a common base sequence and length, a common pattern of backbone linkages, and a common pattern of backbone chiral centers have a common pattern of backbone phosphorus modifications and a common pattern of sugar modifications. In some embodiments, oligonucleotides having a common base sequence and length, a common pattern of backbone linkages, and a common pattern of backbone chiral centers have a common pattern of backbone phosphorus modifications and a common pattern of base modifications. In some embodiments, oligonucleotides having a common base sequence and length, a common pattern of backbone linkages, and a common pattern of backbone chiral centers have a common pattern of backbone phosphorus modifications and a common pattern of nucleoside modifications. In some embodiments, oligonucleotides having a common base sequence and length, a common pattern of backbone linkages, and a common pattern of backbone chiral centers are identical.

[0866] In some embodiments, oligonucleotides in provided compositions have a common pattern of backbone phosphorus modifications. In some embodiments, a common base sequence is a base sequence of an oligonucleotide type.

[0867] As noted above and understood in the art, in some embodiments, base sequence of an oligonucleotide may refer to the identity and/or modification status of nucleoside residues (e.g., of sugar and/or base components, relative to standard naturally occurring nucleotides such as adenine, cytosine, guanosine, thymine, and uracil) in the oligonucleotide and/or to the hybridization character (i.e., the ability to hybridize with particular complementary residues) of such residues.

[0868] In some embodiments, a particular oligonucleotide type may be defined by
[0869] 1A) base identity;
[0870] 1B) pattern of base modification;
[0871] 1C) pattern of sugar modification;
[0872] 2) pattern of backbone linkages;
[0873] 3) pattern of backbone chiral centers; and
[0874] 4) pattern of backbone phosphorus modifications.
   Thus, in some embodiments, oligonucleotides of a particular type may share identical bases but differ in their pattern of base modifications and/or sugar modifications. In some embodiments, oligonucleotides of a particular type may share identical bases and pattern of base modifications (including, e.g., absence of base modification), but differ in pattern of sugar modifications.

[0875] In some embodiments, oligonucleotides of a particular type are identical in that they have the same base sequence (including length), the same pattern of chemical modifications to sugar and base moieties, the same pattern of backbone linkages (e.g., pattern of natural phosphate linkages, phosphorothioate linkages, phosphorothioate triester linkages, and combinations thereof), the same pattern of backbone chiral centers (e.g., pattern of stereochemistry (Rp/Sp) of chiral internucleotidic linkages), and the same pattern of backbone phosphorus modifications (e.g., pattern of modifications on the internucleotidic phosphorus atom, such as —S—, and -L-R¹ of formula I).

[0876] In some embodiments, purity of a chirally controlled oligonucleotide composition of an oligonucleotide type is expressed as the percentage of oligonucleotides in the composition that are of the oligonucleotide type. In some embodiments, at least about 10% of the oligonucleotides in a chirally controlled oligonucleotide composition are of the same oligonucleotide type. In some embodiments, at least about 20% of the oligonucleotides in a chirally controlled oligonucleotide composition are of the same oligonucleotide type. In some embodiments, at least about 30% of the oligonucleotides in a chirally controlled oligonucleotide composition are of the same oligonucleotide type. In some embodiments, at least about 40% of the oligonucleotides in a chirally controlled oligonucleotide composition are of the same oligonucleotide type. In some embodiments, at least about 50% of the oligonucleotides in a chirally controlled oligonucleotide composition are of the same oligonucleotide type. In some embodiments, at least about 60% of the oligonucleotides in a chirally controlled oligonucleotide composition are of the same oligonucleotide type. In some embodiments, at least about 70% of the oligonucleotides in a chirally controlled oligonucleotide composition are of the same oligonucleotide type. In some embodiments, at least about 80% of the oligonucleotides in a chirally controlled oligonucleotide composition are of the same oligonucleotide type. In some embodiments, at least about 90% of the oligonucleotides in a chirally controlled oligonucleotide composition are of the same oligonucleotide type. In some embodiments, at least about 92% of the oligonucleotides in a chirally controlled oligonucleotide composition are of the same oligonucleotide type. In some embodiments, at least about 94% of the oligonucleotides in a chirally controlled oligonucleotide composition are of the same oligonucleotide type. In some embodiments, at least about 95% of the oligonucleotides in a chirally controlled oligonucleotide composition are of the same oligonucleotide type. In some embodiments, at least about 96% of the oligonucleotides in a chirally controlled oligonucleotide composition are of the same oligonucleotide type. In some embodiments, at least about 97% of the oligonucleotides in a chirally controlled oligonucleotide composition are of the same oligonucleotide type. In some embodiments, at least about 98% of the oligonucleotides in a chirally controlled oligonucleotide composition are of the same oligonucleotide type. In some embodiments, at least about 99% of the oligonucleotides in a chirally controlled oligonucleotide composition are of the same oligonucleotide type.

[0877] In some embodiments, purity of a chirally controlled oligonucleotide composition can be controlled by stereoselectivity of each coupling step in its preparation process. In some embodiments, a coupling step has a stereoselectivity (e.g., diastereoselectivity) of 60% (60% of the new internucleotidic linkage formed from the coupling step has the intended stereochemistry). After such a coupling step, the new internucleotidic linkage formed may be referred to have a 60% purity. In some embodiments, each coupling step has a stereoselectivity of at least 60%. In some embodiments, each coupling step has a stereoselectivity of at least 70%. In some embodiments, each coupling step has a stereoselectivity of at least 80%. In some embodiments, each coupling step has a stereoselectivity of at least 85%. In some embodiments, each coupling step has a stereoselectivity of at least 90%. In some embodiments, each coupling step has a stereoselectivity of at least 91%. In some embodiments, each coupling step has a stereoselectivity of at least 92%. In some embodiments, each coupling step has a stereoselectivity of at least 93%. In some embodiments, each coupling step has a stereoselectivity of at least 94%. In some embodiments, each coupling step has a stereoselectivity of at least 95%. In some embodiments, each coupling step has a stereoselectivity of at least 96%. In some embodiments, each coupling step has a stereoselectivity of at least 97%. In some embodiments, each coupling step has a stereoselectivity of at least 98%. In some embodiments, each coupling step has a stereoselectivity of at least 99%. In some embodiments, each coupling step has a stereoselectivity of at least 99.5%. In some embodiments, each coupling step has a stereoselectivity of virtually 100%. In some embodiments, a coupling step has a stereoselectivity of virtually 100% in that all detectable product from the coupling step by an analytical method (e.g., NMR, HPLC, etc) has the intended stereoselectivity. In some embodiments, stereoselectivity of a chiral internucleotidic linkage in an oligonucleotide may be measured through a model reaction, e.g. formation of a dimer under essentially the same or comparable conditions wherein the dimer has the same internucleotidic linkage as the chiral internucleotidic linkage, the 5′-nucleoside of the dimer is the same as the nucleoside to the 5′-end of the chiral internucleotidic linkage, and the 3′-nucleoside of the dimer is the same as the nucleoside to the 3′-end of the chiral internucleotidic linkage (e.g., for fU*SfU*SfC*SfU, through the dimer of fU*SfC). As appreciated by a person having ordinary skill in the art, percentage of oligonucleotides of a particular type having n internucleotidic linkages in a preparation may be calculated as SE¹*SE²*SE³* . . . SEⁿ, wherein SE¹, SE², SE³, . . . , SEⁿ is independently the stereoselectivity of the 1^{st}, 2^{nd}, 3^{rd} . . . , and n^{th} chiral internucleotidic linkage.

[0878] In some embodiments, in provided compositions, at least 0.5%, 1%, 2%, 3%, 4%, 5%, 6%, 7%, 8%, 9%, 10%, 20%, 30%, 40%, 50%, 60%, 70%, 75%, 80%, 81%, 82%, 83%, 84%, 85%, 86%, 87%, 88%, 89%, 90%, 91%, 92%, 93%, 94%, 95%, 96%, 97%, 97% or 99% of oligonucleotides that have the base sequence of a particular oligonucleotide type (defined by 1) base sequence; 2) pattern of backbone linkages; 3) pattern of backbone chiral centers; and 4) pattern of backbone phosphorus modifications) are oligonucleotides of the particular oligonucleotide type. In some embodiments, at least 0.5%, 1%, 2%, 3%, 4%, 5%, 6%, 7%, 8%, 9%, 10%, 20%, 30%, 40%, 50%, 60%, 70%, 75%, 80%, 81%, 82%, 83%, 84%, 85%, 86%, 87%, 88%, 89%, 90%, 91%, 92%, 93%, 94%, 95%, 96%, 97%, 97% or 99% of oligonucleotides that have the base sequence, the pattern of backbone linkages, and the pattern of backbone phosphorus modifications of a particular oligonucleotide type are oligonucleotides of the particular oligonucleotide type. In some embodiments, the percentage is at least 0.5%. In some embodiments, the percentage is at least 1%. In some embodiments, the percentage is at least 2%. In some embodiments, the percentage is at least 3%. In some embodiments, the percentage is at least 4%. In some embodiments, the percentage is at least 5%. In some embodiments, the percentage is at least 6%. In some embodiments, the percentage is at least 7%. In some embodiments, the percentage is at least 8%. In some embodiments, the percentage is at least 9%. In some embodiments, the percentage is at least 10%. In some embodiments, the percentage is at least 20%. In some embodiments, the percentage is at least 30%. In some embodiments, the percentage is at least 40%. In some embodiments, the percentage is at least 50%. In some embodiments, the percentage is at least 60%. In some embodiments, the percentage is at least 70%. In some embodiments, the percentage is at least 75%. In some embodiments, the percentage is at least 80%. In some embodiments, the percentage is at least 81%. In some embodiments, the percentage is at least 82%. In some embodiments, the percentage is at least 83%. In some embodiments, the percentage is at least 84%. In some embodiments, the percentage is at least 85%. In some embodiments, the percentage is at least 86%. In some embodiments, the percentage is at least 87%. In some embodiments, the percentage is at least 88%. In some embodiments, the percentage is at least 89%. In some embodiments, the percentage is at least 90%. In some embodiments, the percentage is at least 91%. In some embodiments, the percentage is at least 92%. In some embodiments, the percentage is at least 93%. In some embodiments, the percentage is at least 94%. In some embodiments, the percentage is at least 95%. In some embodiments, the percentage is at least 96%. In some embodiments, the percentage is at least 97%. In some embodiments, the percentage is at least 98%. In some embodiments, the percentage is at least 99%.

[0879] As described herein, in some embodiments, provided oligonucleotides comprises one or more wing regions and a core region. In some embodiments, a wing region comprises a structural feature that is not in a core region. In some embodiments, a wing and core can be defined by any structural elements, e.g., base modifications (e.g., methylated/non-methylated, methylation at position 1/methylation at position 2, etc.), sugar modifications (e.g., modified/non-modified, 2′-modification/another type of modification, one type of 2′-modification/another type of 2′-modification, etc.), backbone linkage types (e.g., phosphate/phosphorothioate, phosphorothioate/substituted phosphorothioate, etc.), backbone chiral center stereochemistry(e.g., all Sp/all Rp, (SpRp) repeats/all Rp, etc.), backbone phosphorus modification types (e.g., s1/s2, s1/s3, etc.), etc.

[0880] In some embodiments, a wing and core is defined by nucleoside modifications, wherein a wing comprises a nucleoside modification that the core region does not have. In some embodiments, a wing and core is defined by sugar modifications, wherein a wing comprises a sugar modification that the core region does not have. In some embodiments, a sugar modification is a 2′-modification. In some embodiments, a sugar modification is 2′-OR¹. In some embodiments, a sugar modification is 2′-MOE. In some embodiments, a sugar modification is 2′-OMe. Additionally example sugar modifications are described in the present disclosure. In some embodiments, a wing and core is defined by internucleotidic linkages, wherein a wing comprises a internucleotidic linkage type (e.g., natural phosphate linkage, a type of modified internucleotidic linkage, etc.) that the core region does not have. In some embodiments, a wing and core is defined by internucleotidic linkages, wherein a wing has a pattern of backbone linkage that is different from that of the core.

[0881] In some embodiments, oligonucleotides in provided compositions have a wing-core or core-wing structure (hemimer). In some embodiments, oligonucleotides in provided compositions have a wing-core structure of nucleoside modifications. In some embodiments, oligonucleotides in provided compositions have a core-wing structure (another type of hemimer). In some embodiments, oligonucleotides in provided compositions have a core-wing structure of nucleoside modifications. In some embodiments, oligonucleotides in provided compositions have a wing-core-wing structure (gapmer). In some embodiments, oligonucleotides in provided compositions have a wing-core-wing structure of nucleoside modifications. In some embodiments, a wing and core is defined by modifications of the sugar moieties. In some embodiments, a wing and core is defined by modifications of the base moieties. In some embodiments, each sugar moiety in the wing region has the same 2′-modification which is not found in the core region. In some embodiments, each sugar moiety in the wing region has the same 2′-modification which is different than any sugar modifications in the core region. In some embodiments, a core region has no sugar modification. In some embodiments, each sugar moiety in the wing region has the same 2′-modification, and the core region has no 2′-modifications. In some embodiments, when two or more wings are present, each wing is defined by its own modifications. In some embodiments, each wing has its own characteristic sugar modification. In some embodiments, each wing has the same characteristic sugar modification differentiating it from a core. In some embodiments, each wing sugar moiety has the same modification. In some embodiments, each wing sugar moiety has the same 2′-modification. In some embodiments, each sugar moiety in a wing region has the same 2′-modification, yet the common 2′-modification in a first wing region can either be the same as or different from the common 2′-modification in a second wing region. In some embodiments, each sugar moiety in a wing region has the same 2′-modification, and the common 2′-modification in a first wing region is the same as the common 2′-modification in a second wing region. In some embodiments, each sugar moiety in a wing region has the same 2′-modification, and the common 2′-modification in a first wing region is different from the common 2′-modification in a second wing region.

[0882] In some embodiments, provided chirally controlled (and/or stereochemically pure) preparations are antisense oligonucleotides (e.g., chiromersen). In some embodiments, provided chirally controlled (and/or stereochemically pure) preparations are siRNA oligonucleotides. In some embodiments, a provided chirally controlled oligonucleotide composition is of oligonucleotides that can be antisense oligonucleotide, antagomir, microRNA, pre-microRNs, antimir, supermir, ribozyme, Ul adaptor, RNA activator, RNAi agent, decoy oligonucleotide, triplex forming oligonucleotide, aptamer or adjuvant. In some embodiments, a chirally controlled oligonucleotide composition is of antisense oligonucleotides. In some embodiments, a chirally controlled oligonucleotide composition is of antagomir oligonucleotides. In some embodiments, a chirally controlled oligonucleotide composition is of microRNA oligonucleotides. In some embodiments, a chirally controlled oligonucleotide composition is of pre-microRNA oligonucleotides. In some embodiments, a chirally controlled oligonucleotide composition is of antimir oligonucleotides. In some embodiments, a chirally controlled oligonucleotide composition is of supermir oligonucleotides. In some embodiments, a chirally controlled oligonucleotide composition is of ribozyme oligonucleotides. In some embodiments, a chirally controlled oligonucleotide composition is of Ul adaptor oligonucleotides. In some embodiments, a chirally controlled oligonucleotide composition is of RNA activator oligonucleotides. In some embodiments, a chirally controlled oligonucleotide composition is of RNAi agent oligonucleotides. In some embodiments, a chirally controlled oligonucleotide composition is of decoy oligonucleotides. In some embodiments, a chirally controlled oligonucleotide composition is of triplex forming oligonucleotides. In some embodiments, a chirally controlled oligonucleotide composition is of aptamer oligonucleotides. In some embodiments, a chirally controlled oligonucleotide composition is of adjuvant oligonucleotides.

[0883] In some embodiments, provided chirally controlled (and/or stereochemically pure) preparations are of oligonucleotides that include one or more modified backbone linkages, bases, and/or sugars.

[0884] In some embodiments, a provided oligonucleotide comprises one or more chiral, modified phosphate linkages. In some embodiments, a provided oligonucleotide comprises two or more chiral, modified phosphate linkages. In some embodiments, a provided oligonucleotide comprises three or more chiral, modified phosphate linkages. In some embodiments, a provided oligonucleotide comprises four or more chiral, modified phosphate linkages. In some embodiments, a provided oligonucleotide comprises five or more chiral, modified phosphate linkages. In some embodiments, a provided oligonucleotide comprises 1, 2, 3, 4, 5, 6, 7, 8, 9, 10, 11, 12, 13, 14, 15, 16, 17, 18, 19, 20, 21, 22, 23, 24, or 25 chiral, modified phosphate linkages. In some embodiments, a provided oligonucleotide type comprises 5 or more chiral, modified phosphate linkages. In some embodiments, a provided oligonucleotide type comprises 6 or more chiral, modified phosphate linkages. In some embodiments, a provided oligonucleotide type comprises 7 or more chiral, modified phosphate linkages. In some embodiments, a provided oligonucleotide type comprises 8 or more chiral, modified phosphate linkages. In some embodiments, a provided oligonucleotide type comprises 9 or more chiral, modified phosphate linkages. In some embodiments, a provided oligonucleotide type comprises 10 or more chiral, modified phosphate linkages. In some embodiments, a provided oligonucleotide type comprises 11 or more chiral, modified phosphate linkages. In some embodiments, a provided oligonucleotide type comprises 12 or more chiral, modified phosphate linkages. In some embodiments, a provided oligonucleotide type comprises 13 or more chiral, modified phosphate linkages. In some embodiments, a provided oligonucleotide type comprises 14 or more chiral, modified phosphate linkages. In some embodiments, a provided oligonucleotide type comprises 15 or more chiral, modified phosphate linkages. In some embodiments, a provided oligonucleotide type comprises 16 or more chiral, modified phosphate linkages. In some embodiments, a provided oligonucleotide type comprises 17 or more chiral, modified phosphate linkages. In some embodiments, a provided oligonucleotide type comprises 18 or more chiral, modified phosphate linkages. In some embodiments, a provided oligonucleotide type comprises 19 or more chiral, modified phosphate linkages. In some embodiments, a provided oligonucleotide type comprises 20 or more chiral, modified phosphate linkages. In some embodiments, a provided oligonucleotide type comprises 21 or more chiral, modified phosphate linkages. In some embodiments, a provided oligonucleotide type comprises 22 or more chiral, modified phosphate linkages. In some embodiments, a provided oligonucleotide type comprises 23 or more chiral, modified phosphate linkages. In some embodiments, a provided oligonucleotide type comprises 24 or more chiral, modified phosphate linkages. In some embodiments, a provided oligonucleotide type comprises 25 or more chiral, modified phosphate linkages.

[0885] In some embodiments, a provided oligonucleotide comprises at least 5%, 10%, 15%, 20%, 25%, 30%, 35%, 40%, 45%, 50%, 55%, 60%, 65%, 70%, 75%, 80%, 85%, 90%, 95%, or 100% chiral, modified phosphate linkages. Example such chiral, modified phosphate linkages are described above and herein. In some embodiments, a provided oligonucleotide comprises at least 5%, 10%, 15%, 20%, 25%, 30%, 35%, 40%, 45%, 50%, 55%, 60%, 65%, 70%, 75%, 80%, 85%, 90%, 95%, or 100% chiral, modified phosphate linkages in the Sp configuration.

[0886] In some embodiments, provided chirally controlled (and/or stereochemically pure) preparations are of a stereochemical purity of greater than about 80%. In some embodiments, provided chirally controlled (and/or stereochemically pure) preparations are of a stereochemical purity of greater than about 85%. In some embodiments, provided chirally controlled (and/or stereochemically pure) preparations are of a stereochemical purity of greater than about 90%. In some embodiments, provided chirally controlled (and/or stereochemically pure) preparations are of a stereochemical purity of greater than about 91%. In some embodiments, provided chirally controlled (and/or stereochemically pure) preparations are of a stereochemical purity of greater than about 92%. In some embodiments, provided chirally controlled (and/or stereochemically pure) preparations are of a stereochemical purity of greater than about 93%. In some embodiments, provided chirally controlled (and/or stereochemically pure) preparations are of a stereochemical purity of greater than about 94%. In some embodiments, provided chirally controlled (and/or stereochemically pure) preparations are of a stereochemical purity of greater than about 95%. In some embodiments, provided chirally controlled (and/or stereochemically pure) preparations are of a stereochemical purity of greater than about 96%. In some embodiments, provided chirally controlled (and/or stereochemically pure) preparations are of a stereochemical purity of greater than about 97%. In some embodiments, provided chirally controlled (and/or stereochemically pure) preparations are of a stereochemical purity of greater than about 98%. In some embodiments, provided chirally controlled (and/or stereochemically pure) preparations are of a stereochemical purity of greater than about 99%. In some embodiments, such a provided purity can be of one or more chiral internucleotidic linkage is a composition is partially chirally controlled.

[0887] In some embodiments, a chiral, modified phosphate linkage is a chiral phosphorothioate linkage, i.e., phosphorothioate internucleotidic linkage. In some embodiments, a provided oligonucleotide comprises at least 5%, 10%, 15%, 20%, 25%, 30%, 35%, 40%, 45%, 50%, 55%, 60%, 65%, 70%, 75%, 80%, 85%, 90%, 95%, or 100% chiral phosphorothioate internucleotidic linkages. In some embodiments, all chiral, modified phosphate linkages are chiral phosphorothioate internucleotidic linkages. In some embodiments, at least about 10, 20, 30, 40, 50, 60, 70, 80, or 90% chiral phosphorothioate internucleotidic linkages of a provided oligonucleotide are of the Sp conformation. In some embodiments, at least about 10% chiral phosphorothioate internucleotidic linkages of a provided oligonucleotide are of the Sp conformation. In some embodiments, at least about 20% chiral phosphorothioate internucleotidic linkages of a provided oligonucleotide are of the Sp conformation. In some embodiments, at least about 30% chiral phosphorothioate internucleotidic linkages of a provided oligonucleotide are of the Sp conformation. In some embodiments, at least about 40% chiral phosphorothioate internucleotidic linkages of a provided oligonucleotide are of the Sp conformation. In some embodiments, at least about 50% chiral phosphorothioate internucleotidic linkages of a provided oligonucleotide are of the Sp conformation. In some embodiments, at least about 60% chiral phosphorothioate internucleotidic linkages of a provided oligonucleotide are of the Sp conformation. In some embodiments, at least about 70% chiral phosphorothioate internucleotidic linkages of a provided oligonucleotide are of the Sp conformation. In some embodiments, at least about 80% chiral phosphorothioate internucleotidic linkages of a provided oligonucleotide are of the Sp conformation. In some embodiments, at least about 90% chiral phosphorothioate internucleotidic linkages of a provided oligonucleotide are of the Sp conformation. In some embodiments, at least about 95% chiral phosphorothioate internucleotidic linkages of a provided oligonucleotide are of the Sp conformation.

[0888] In some embodiments, at least about 10, 20, 30, 40, 50, 60, 70, 80, or 90% chiral phosphorothioate internucleotidic linkages of a provided oligonucleotide are of the Rp conformation. In some embodiments, at least about 10% chiral phosphorothioate internucleotidic linkages of a provided oligonucleotide are of the Rp conformation. In some embodiments, at least about 20% chiral phosphorothioate internucleotidic linkages of a provided oligonucleotide are of the Rp conformation. In some embodiments, at least about 30% chiral phosphorothioate internucleotidic linkages of a provided oligonucleotide are of the Rp conformation. In some embodiments, at least about 40% chiral phosphorothioate internucleotidic linkages of a provided oligonucleotide are of the Rp conformation. In some embodiments, at least about 50% chiral phosphorothioate internucleotidic linkages of a provided oligonucleotide are of the Rp conformation. In some embodiments, at least about 60% chiral phosphorothioate internucleotidic linkages of a provided oligonucleotide are of the Rp conformation. In some embodiments, at least about 70% chiral phosphorothioate internucleotidic linkages of a provided oligonucleotide are of the Rp conformation. In some embodiments, at least about 80% chiral phosphorothioate internucleotidic linkages of a provided oligonucleotide are of the Rp conformation. In some embodiments, at least about 90% chiral phosphorothioate internucleotidic linkages of a provided oligonucleotide are of the Rp conformation. In some embodiments, at least about 95% chiral phosphorothioate internucleotidic linkages of a provided oligonucleotide are of the Rp conformation.

[0889] In some embodiments, less than about 10, 20, 30, 40, 50, 60, 70, 80, or 90% chiral phosphorothioate internucleotidic linkages of a provided oligonucleotide are of the Rp conformation. In some embodiments, less than about 10% chiral phosphorothioate internucleotidic linkages of a provided oligonucleotide are of the Rp conformation. In some embodiments, less than about 20% chiral phosphorothioate internucleotidic linkages of a provided oligonucleotide are of the Rp conformation. In some embodiments, less than about 30% chiral phosphorothioate internucleotidic linkages of a provided oligonucleotide are of the Rp conformation. In some embodiments, less than about 40% chiral phosphorothioate internucleotidic linkages of a provided oligonucleotide are of the Rp conformation. In some embodiments, less than about 50% chiral phosphorothioate internucleotidic linkages of a provided oligonucleotide are of the Rp conformation. In some embodiments, less than about 60% chiral phosphorothioate internucleotidic linkages of a provided oligonucleotide are of the Rp conformation. In some embodiments, less than about 70% chiral phosphorothioate internucleotidic linkages of a provided oligonucleotide are of the Rp conformation. In some embodiments, less than about 80% chiral phosphorothioate internucleotidic linkages of a provided oligonucleotide are of the Rp conformation. In some embodiments, less than about 90% chiral phosphorothioate internucleotidic linkages of a provided oligonucleotide are of the Rp conformation. In some embodiments, less than about 95% chiral phosphorothioate internucleotidic linkages of a provided oligonucleotide are of the Rp conformation. In some embodiments, a provided oligonucleotide has only one Rp chiral phosphorothioate internucleotidic linkages. In some embodiments, a provided oligonucleotide has only one Rp chiral phosphorothioate internucleotidic linkages, wherein all internucleotide linkages are chiral phosphorothioate internucleotidic linkages.

[0890] In some embodiments, a chiral phosphorothioate internucleotidic linkage is a chiral phosphorothioate diester linkage. In some embodiments, each chiral phosphorothioate internucleotidic linkage is independently a chiral phosphorothioate diester linkage. In some embodiments, each internucleotidic linkage is independently a chiral phosphorothioate diester linkage. In some embodiments, each internucleotidic linkage is independently a chiral phosphorothioate diester linkage, and only one is Rp.

[0891] In some embodiments, provided chirally controlled (and/or stereochemically pure) preparations are of oligonucleotides that contain one or more modified bases. In some embodiments, provided chirally controlled (and/or stereochemically pure) preparations are of oligonucleotides that contain no modified bases. Example such modified bases are described above and herein.

[0892] In some embodiments, an oligonucleotide comprises at least one internucleotidic linkage which is chirally controlled (e.g., a phosphorothioate in Sp or Rp configuration) and at least one internucleotidic linkage which is not chiral (e.g., a phosphodiester or phosphorodithioate). In some embodiments, an oligonucleotide comprises at least one internucleotidic linkage which is chirally controlled phosphorothioate in Sp configuration and at least one internucleotidic linkage which is not chiral (e.g., a phosphodiester or phosphorodithioate).

[0893] In some embodiments, oligonucleotides of provided compositions comprise at least 2, 3, 4, 5, 6, 7, 8, 9 or 10 natural phosphate linkages. In some embodiments, oligonucleotides of provided compositions comprise at least one natural phosphate linkage. In some embodiments, oligonucleotides of provided compositions comprise at least two natural phosphate linkages. In some embodiments, oligonucleotides of provided compositions comprise at least three natural phosphate linkages. In some embodiments, oligonucleotides of provided compositions comprise at least four natural phosphate linkages. In some embodiments, oligonucleotides of provided compositions comprise at least five natural phosphate linkages. In some embodiments, oligonucleotides of provided compositions comprise at least six natural phosphate linkages. In some embodiments, oligonucleotides of provided compositions comprise at least seven natural phosphate linkages. In some embodiments, oligonucleotides of provided compositions comprise at least eight natural phosphate linkages. In some embodiments, oligonucleotides of provided compositions comprise at least nine natural phosphate linkages. In some embodiments, oligonucleotides of provided compositions comprise at least ten natural phosphate linkages.

[0894] In some embodiments, oligonucleotides of provided compositions comprise 2, 3, 4, 5, 6, 7, 8, 9 or 10 natural phosphate linkages. In some embodiments, oligonucleotides of provided compositions comprise one natural phosphate linkage. In some embodiments, oligonucleotides of provided compositions comprise two natural phosphate linkages. In some embodiments, oligonucleotides of provided compositions comprise three natural phosphate linkages. In some embodiments, oligonucleotides of provided compositions comprise four natural phosphate linkages. In some embodiments, oligonucleotides of provided compositions comprise five natural phosphate linkages. In some embodiments, oligonucleotides of provided compositions comprise six natural phosphate linkages. In some embodiments, oligonucleotides of provided compositions comprise seven natural phosphate linkages. In some embodiments, oligonucleotides of provided compositions comprise eight natural phosphate linkages. In some embodiments, oligonucleotides of provided compositions comprise nine natural phosphate linkages. In some embodiments, oligonucleotides of provided compositions comprise ten natural phosphate linkages.

[0895] In some embodiments, oligonucleotides of provided compositions comprise at least 2, 3, 4, 5, 6, 7, 8, 9 or 10 consecutive natural phosphate linkages. In some embodiments, oligonucleotides of provided compositions comprise at least two consecutive natural phosphate linkages. In some embodiments, oligonucleotides of provided compositions comprise at least three consecutive natural phosphate linkages. In some embodiments, oligonucleotides of provided compositions comprise at least four consecutive natural phosphate linkages. In some embodiments, oligonucleotides of provided compositions comprise at least five consecutive natural phosphate linkages. In some embodiments, oligonucleotides of provided compositions comprise at least six consecutive natural phosphate linkages. In some embodiments, oligonucleotides of provided compositions comprise at least seven consecutive natural phosphate linkages. In some embodiments, oligonucleotides of provided compositions comprise at least eight consecutive natural phosphate linkages. In some embodiments, oligonucleotides of provided compositions comprise at least nine consecutive natural phosphate linkages. In some embodiments, oligonucleotides of provided compositions comprise at least ten consecutive natural phosphate linkages.

[0896] In some embodiments, oligonucleotides of provided compositions comprise 2, 3, 4, 5, 6, 7, 8, 9 or 10 consecutive natural phosphate linkages. In some embodiments, oligonucleotides of provided compositions comprise two consecutive natural phosphate linkages. In some embodiments, oligonucleotides of provided compositions comprise three consecutive natural phosphate linkages. In some embodiments, oligonucleotides of provided compositions comprise four consecutive natural phosphate linkages. In some embodiments, oligonucleotides of provided compositions comprise five consecutive natural phosphate linkages. In some embodiments, oligonucleotides of provided compositions comprise six consecutive natural phosphate linkages. In some embodiments, oligonucleotides of provided compositions comprise seven consecutive natural phosphate linkages. In some embodiments, oligonucleotides of provided compositions comprise eight consecutive natural phosphate linkages. In some embodiments, oligonucleotides of provided compositions comprise nine consecutive natural phosphate linkages. In some embodiments, oligonucleotides of provided compositions comprise ten consecutive natural phosphate linkages.

[0897] In some embodiments, provided chirally controlled (and/or stereochemically pure) preparations are of oligonucleotides having a common base sequence of at least 8 bases. In some embodiments, provided chirally controlled (and/or stereochemically pure) preparations are of oligonucleotides having a common base sequence of at least 9 bases. In some embodiments, provided chirally controlled (and/or stereochemically pure) preparations are of oligonucleotides having a common base sequence of at least 10 bases. In some embodiments, provided chirally controlled (and/or stereochemically pure) preparations are of oligonucleotides having a common base sequence of at least 11 bases. In some embodiments, provided chirally controlled (and/or stereochemically pure) preparations are of oligonucleotides having a common base sequence of at least 12 bases. In some embodiments, provided chirally controlled (and/or stereochemically pure) preparations are of oligonucleotides having a common base sequence of at least 13 bases. In some embodiments, provided chirally controlled (and/or stereochemically pure) preparations are of oligonucleotides having a common base sequence of at least 14 bases. In some embodiments, provided chirally controlled (and/or stereochemically pure) preparations are of oligonucleotides having a common base sequence of at least 15 bases. In some embodiments, provided chirally controlled (and/or stereochemically pure) preparations are of oligonucleotides having a common base sequence of at least 16 bases. In some embodiments, provided chirally controlled (and/or stereochemically pure) preparations are of oligonucleotides having a common base sequence of at least 17 bases. In some embodiments, provided chirally controlled (and/or stereochemically pure) preparations are of oligonucleotides having a common base sequence of at least 18 bases. In some embodiments, provided chirally controlled (and/or stereochemically pure) preparations are of oligonucleotides having a common base sequence of at least 19 bases. In some embodiments, provided chirally controlled (and/or stereochemically pure) preparations are of oligonucleotides having a common base sequence of at least 20 bases. In some embodiments, provided chirally controlled (and/or stereochemically pure) preparations are of oligonucleotides having a common base sequence of at least 21 bases. In some embodiments, provided chirally controlled (and/or stereochemically pure) preparations are of oligonucleotides having a common base sequence of at least 22 bases. In some embodiments, provided chirally controlled (and/or stereochemically pure) preparations are of oligonucleotides having a common base sequence of at least 23 bases. In some embodiments, provided chirally controlled (and/or stereochemically pure) preparations are of oligonucleotides having a common base sequence of at least 24 bases. In some embodiments, provided chirally controlled (and/or stereochemically pure) preparations are of oligonucleotides having a common base sequence of at least 25 bases. In some embodiments, provided chirally controlled (and/or stereochemically pure) preparations are of oligonucleotides having a common base sequence of at least 30, 35, 40, 45, 50, 55, 60, 65, 70, or 75 bases.

[0898] In some embodiments, provided compositions comprise oligonucleotides containing one or more residues which are modified at the sugar moiety. In some embodiments, provided compositions comprise oligonucleotides containing one or more residues which are modified at the 2′ position of the sugar moiety (referred to herein as a “2′-modification”). Example such modifications are described above and herein and include, but are not limited to, 2′-OMe, 2′-MOE, 2′-LNA, 2′-F, FRNA, FANA, S-cEt, etc. In some embodiments, provided compositions comprise oligonucleotides containing one or more residues which are 2′-modified. For example, in some embodiments, provided oligonucleotides contain one or more residues which are 2′-O-methoxyethyl (2′-MOE)-modified residues. In some embodiments, provided compositions comprise oligonucleotides which do not contain any 2′-modifications. In some embodiments, provided compositions are oligonucleotides which do not contain any 2′-MOE residues. That is, in some embodiments, provided oligonucleotides are not MOE-modified. Additional example sugar modifications are described in the present disclosure.

[0899] In some embodiments, provided oligonucleotides are of a general motif of wing-core or core-wing (hemimer, also represented herein generally as X—Y or Y—X, respectively). In some embodiments, provided oligonucleotides are of a general motif of wing-core-wing (gapmer, also represented herein generally as X—Y—X). In some embodiments, each wing region independently contains one or more residues having a particular modification, which modification is absent from the core “Y” portion. In some embodiments, each wing region independently contains one or more residues having a particular nucleoside modification, which modification is absent from the core “Y” portion. In some embodiments, each wing region independently contains one or more residues having a particular base modification, which modification is absent from the core “Y” portion. In some embodiments, each wing region independently contains one or more residues having a particular sugar modification, which modification is absent from the core “Y” portion. Example sugar modifications are widely known in the art. In some embodiments, a sugar modification is a modification selected from those modifications described in U.S. Pat. No. 9,006,198, which sugar modifications are incorporated herein by references. Additional example sugar modifications are described in the present disclosure. In some embodiment, each wing contains one or more residues having a 2′ modification that is not present in the core portion. In some embodiments, a 2′-modification is 2′-OR¹, wherein R¹ is as defined and described in the present disclosure.

[0900] In some embodiments, provided oligonucleotides have a wing-core motif represented as X—Y, or a core-wing motif represented as Y—X, wherein the residues at the “X” portion are sugar modified residues of a particular type and the residues in the core “Y” portion are not sugar modified residues of the same particular type. In some embodiments, provided oligonucleotides have a wing-core-wing motif represented as X—Y—X, wherein the residues at each “X” portion are sugar modified residues of a particular type and the residues in the core “Y” portion are not sugar modified residues of the same particular type. In some embodiments, provided oligonucleotides have a wing-core motif represented as X—Y, or a core-wing motif represented as Y—X, wherein the residues at the “X” portion are 2′-modified residues of a particular type and the residues in the core “Y” portion are not 2′-modified residues of the same particular type. In some embodiments, provided oligonucleotides have a wing-core motif represented as X—Y, wherein the residues at the “X” portion are 2′-modified residues of a particular type and the residues in the core “Y” portion are not 2′-modified residues of the same particular type. In some embodiments, provided oligonucleotides have a core-wing motif represented as Y—X, wherein the residues at the “X” portion are 2′-modified residues of a particular type and the residues in the core “Y” portion are not 2′-modified residues of the same particular type. In some embodiments, provided oligonucleotides have a wing-core-wing motif represented as X—Y—X, wherein the residues at each “X” portion are 2′-modified residues of a particular type and the residues in the core “Y” portion are not 2′-modified residues of the same particular type. In some embodiments, provided oligonucleotides have a wing-core motif represented as X—Y, wherein the residues at the “X” portion are 2′-modified residues of a particular type and the residues in the core “Y” portion are 2′-deoxyribonucleoside. In some embodiments, provided oligonucleotides have a core-wing motif represented as Y—X, wherein the residues at the “X” portion are 2′-modified residues of a particular type and the residues in the core “Y” portion are 2′-deoxyribonucleoside. In some embodiments, provided oligonucleotides have a wing-core-wing motif represented as X—Y—X, wherein the residues at each “X” portion are 2′-modified residues of a particular type and the residues in the core “Y” portion are 2′-deoxyribonucleoside. In some embodiments, provided oligonucleotides have a wing-core-wing motif represented as X—Y—X, wherein the residues at each “X” portion are 2′-modified residues of a particular type and the residues in the core “Y” portion are 2′-deoxyribonucleoside. For instance, in some embodiments, provided oligonucleotides have a wing-core-wing motif represented as X—Y—X, wherein the residues at each “X” portion are 2′-MOE-modified residues and the residues in the core “Y” portion are not 2′-MOE-modified residues. In some embodiments, provided oligonucleotides have a wing-core-wing motif represented as X—Y—X, wherein the residues at each “X” portion are 2′-MOE-modified residues and the residues in the core “Y” portion are 2′-deoxyribonucleoside. One of skill in the relevant arts will recognize that all such 2′-modifications described above and herein are contemplated in the context of such X—Y, Y—X and/or X—Y—X motifs.

[0901] In some embodiments, a wing has a length of one or more bases. In some embodiments, a wing has a length of two or more bases. In some embodiments, a wing has a length of three or more bases. In some embodiments, a wing has a length of four or more bases. In some embodiments, a wing has a length of five or more bases. In some embodiments, a wing has a length of six or more bases. In some embodiments, a wing has a length of seven or more bases. In some embodiments, a wing has a length of eight or more bases. In some embodiments, a wing has a length of nine or more bases. In some embodiments, a wing has a length of ten or more bases. In some embodiments, a wing has a length of 11 or more bases. In some embodiments, a wing has a length of 12 or more bases. In some embodiments, a wing has a length of 13 or more bases. In some embodiments, a wing has a length of 14 or more bases. In some embodiments, a wing has a length of 15 or more bases. In some embodiments, a wing has a length of 16 or more bases. In some embodiments, a wing has a length of 17 or more bases. In some embodiments, a wing has a length of 18 or more bases. In some embodiments, a wing has a length of 19 or more bases. In some embodiments, a wing has a length often or more bases.

[0902] In some embodiments, a wing has a length of one base. In some embodiments, a wing has a length of two bases. In some embodiments, a wing has a length of three bases. In some embodiments, a wing has a length of four bases. In some embodiments, a wing has a length of five bases. In some embodiments, a wing has a length of six bases. In some embodiments, a wing has a length of seven bases. In some embodiments, a wing has a length of eight bases. In some embodiments, a wing has a length of nine bases. In some embodiments, a wing has a length of ten bases. In some embodiments, a wing has a length of 11 bases. In some embodiments, a wing has a length of 12 bases. In some embodiments, a wing has a length of 13 bases. In some embodiments, a wing has a length of 14 bases. In some embodiments, a wing has a length of 15 bases. In some embodiments, a wing has a length of 16 bases. In some embodiments, a wing has a length of 17 bases. In some embodiments, a wing has a length of 18 bases. In some embodiments, a wing has a length of 19 bases. In some embodiments, a wing has a length of ten bases.

[0903] In some embodiments, a wing comprises one or more chiral internucleotidic linkages. In some embodiments, a wing comprises one or more natural phosphate linkages. In some embodiments, a wing comprises one or more chiral internucleotidic linkages and one or more natural phosphate linkages. In some embodiments, a wing comprises one or more chiral internucleotidic linkages and two or more natural phosphate linkages. In some embodiments, a wing comprises one or more chiral internucleotidic linkages and two or more natural phosphate linkages, wherein two or more natural phosphate linkages are consecutive. In some embodiments, a wing comprises no chiral internucleotidic linkages. In some embodiments, each wing linkage is a natural phosphate linkage. In some embodiments, a wing comprises no phosphate linkages. In some embodiments, each wing is independently a chiral internucleotidic linkage.

[0904] In some embodiments, each wing region independently comprises one or more chiral internucleotidic linkages. In some embodiments, each wing region independently comprises one or more natural phosphate linkages. In some embodiments, each wing region independently comprises one or more chiral internucleotidic linkages and one or more natural phosphate linkages. In some embodiments, each wing region independently comprises one or more chiral internucleotidic linkages and two or more natural phosphate linkages. In some embodiments, each wing region independently comprises one or more chiral internucleotidic linkages and two or more natural phosphate linkages, wherein two or more natural phosphate linkages are consecutive.

[0905] In some embodiments, each wing region independently comprises at least one chiral internucleotidic linkage. In some embodiments, each wing region independently comprises at least two chiral internucleotidic linkages. In some embodiments, each wing region independently comprises at least three chiral internucleotidic linkages. In some embodiments, each wing region independently comprises at least four chiral internucleotidic linkages. In some embodiments, each wing region independently comprises at least five chiral internucleotidic linkages. In some embodiments, each wing region independently comprises at least six chiral internucleotidic linkages. In some embodiments, each wing region independently comprises at least seven chiral internucleotidic linkages. In some embodiments, each wing region independently comprises at least eight chiral internucleotidic linkages. In some embodiments, each wing region independently comprises at least nine chiral internucleotidic linkages. In some embodiments, each wing region independently comprises at least ten chiral internucleotidic linkages. In some embodiments, each wing region independently comprises at least 11 chiral internucleotidic linkages. In some embodiments, each wing region independently comprises at least 12 chiral internucleotidic linkages. In some embodiments, each wing region independently comprises at least 13 chiral internucleotidic linkages. In some embodiments, each wing region independently comprises at least 14 chiral internucleotidic linkages. In some embodiments, each wing region independently comprises at least 15 chiral internucleotidic linkages. In some embodiments, each wing region independently comprises at least 16 chiral internucleotidic linkages. In some embodiments, each wing region independently comprises at least 17 chiral internucleotidic linkages. In some embodiments, each wing region independently comprises at least 18 chiral internucleotidic linkages. In some embodiments, each wing region independently comprises at least 19 chiral internucleotidic linkages. In some embodiments, each wing region independently comprises at least 20 chiral internucleotidic linkages.

[0906] In some embodiments, each wing region independently comprises one chiral internucleotidic linkage. In some embodiments, each wing region independently comprises two chiral internucleotidic linkages. In some embodiments, each wing region independently comprises three chiral internucleotidic linkages. In some embodiments, each wing region independently comprises four chiral internucleotidic linkages. In some embodiments, each wing region independently comprises five chiral internucleotidic linkages. In some embodiments, each wing region independently comprises six chiral internucleotidic linkages. In some embodiments, each wing region independently comprises seven chiral internucleotidic linkages. In some embodiments, each wing region independently comprises eight chiral internucleotidic linkages. In some embodiments, each wing region independently comprises nine chiral internucleotidic linkages. In some embodiments, each wing region independently comprises ten chiral internucleotidic linkages. In some embodiments, each wing region independently comprises 11 chiral internucleotidic linkages. In some embodiments, each wing region independently comprises 12 chiral internucleotidic linkages. In some embodiments, each wing region independently comprises 13 chiral internucleotidic linkages. In some embodiments, each wing region independently comprises 14 chiral internucleotidic linkages. In some embodiments, each wing region independently comprises 15 chiral internucleotidic linkages. In some embodiments, each wing region independently comprises 16 chiral internucleotidic linkages. In some embodiments, each wing region independently comprises 17 chiral internucleotidic linkages. In some embodiments, each wing region independently comprises 18 chiral internucleotidic linkages. In some embodiments, each wing region independently comprises 19 chiral internucleotidic linkages. In some embodiments, each wing region independently comprises 20 chiral internucleotidic linkages.

[0907] In some embodiments, each wing region independently comprises at least one consecutive natural phosphate linkage. In some embodiments, each wing region independently comprises at least two consecutive chiral internucleotidic linkages. In some embodiments, each wing region independently comprises at least three consecutive chiral internucleotidic linkages. In some embodiments, each wing region independently comprises at least four consecutive chiral internucleotidic linkages. In some embodiments, each wing region independently comprises at least five consecutive chiral internucleotidic linkages. In some embodiments, each wing region independently comprises at least six consecutive chiral internucleotidic linkages. In some embodiments, each wing region independently comprises at least seven consecutive chiral internucleotidic linkages. In some embodiments, each wing region independently comprises at least eight consecutive chiral internucleotidic linkages. In some embodiments, each wing region independently comprises at least nine consecutive chiral internucleotidic linkages. In some embodiments, each wing region independently comprises at least ten consecutive chiral internucleotidic linkages. In some embodiments, each wing region independently comprises at least 11 consecutive chiral internucleotidic linkages. In some embodiments, each wing region independently comprises at least 12 consecutive chiral internucleotidic linkages. In some embodiments, each wing region independently comprises at least 13 consecutive chiral internucleotidic linkages. In some embodiments, each wing region independently comprises at least 14 consecutive chiral internucleotidic linkages. In some embodiments, each wing region independently comprises at least 15 consecutive chiral internucleotidic linkages. In some embodiments, each wing region independently comprises at least 16 consecutive chiral internucleotidic linkages. In some embodiments, each wing region independently comprises at least 17 consecutive chiral internucleotidic linkages. In some embodiments, each wing region independently comprises at least 18 consecutive chiral internucleotidic linkages. In some embodiments, each wing region independently comprises at least 19 consecutive chiral internucleotidic linkages. In some embodiments, each wing region independently comprises at least 20 consecutive chiral internucleotidic linkages.

[0908] In some embodiments, each wing region independently comprises one consecutive natural phosphate linkage. In some embodiments, each wing region independently comprises two consecutive chiral internucleotidic linkages. In some embodiments, each wing region independently comprises three consecutive chiral internucleotidic linkages. In some embodiments, each wing region independently comprises four consecutive chiral internucleotidic linkages. In some embodiments, each wing region independently comprises five consecutive chiral internucleotidic linkages. In some embodiments, each wing region independently comprises six consecutive chiral internucleotidic linkages. In some embodiments, each wing region independently comprises seven consecutive chiral internucleotidic linkages. In some embodiments, each wing region independently comprises eight consecutive chiral internucleotidic linkages. In some embodiments, each wing region independently comprises nine consecutive chiral internucleotidic linkages. In some embodiments, each wing region independently comprises ten consecutive chiral internucleotidic linkages. In some embodiments, each wing region independently comprises 11 consecutive chiral internucleotidic linkages. In some embodiments, each wing region independently comprises 12 consecutive chiral internucleotidic linkages. In some embodiments, each wing region independently comprises 13 consecutive chiral internucleotidic linkages. In some embodiments, each wing region independently comprises 14 consecutive chiral internucleotidic linkages. In some embodiments, each wing region independently comprises 15 consecutive chiral internucleotidic linkages. In some embodiments, each wing region independently comprises 16 consecutive chiral internucleotidic linkages. In some embodiments, each wing region independently comprises 17 consecutive chiral internucleotidic linkages. In some embodiments, each wing region independently comprises 18 consecutive chiral internucleotidic linkages. In some embodiments, each wing region independently comprises 19 consecutive chiral internucleotidic linkages. In some embodiments, each wing region independently comprises 20 consecutive chiral internucleotidic linkages.

[0909] In some embodiments, each wing region independently comprises at least one natural phosphate linkage. In some embodiments, each wing region independently comprises at least two natural phosphate linkages. In some embodiments, each wing region independently comprises at least three natural phosphate linkages. In some embodiments, each wing region independently comprises at least four natural phosphate linkages. In some embodiments, each wing region independently comprises at least five natural phosphate linkages. In some embodiments, each wing region independently comprises at least six natural phosphate linkages. In some embodiments, each wing region independently comprises at least seven natural phosphate linkages. In some embodiments, each wing region independently comprises at least eight natural phosphate linkages. In some embodiments, each wing region independently comprises at least nine natural phosphate linkages. In some embodiments, each wing region independently comprises at least ten natural phosphate linkages. In some embodiments, each wing region independently comprises at least 11 natural phosphate linkages. In some embodiments, each wing region independently comprises at least 12 natural phosphate linkages. In some embodiments, each wing region independently comprises at least 13 natural phosphate linkages. In some embodiments, each wing region independently comprises at least 14 natural phosphate linkages. In some embodiments, each wing region independently comprises at least 15 natural phosphate linkages. In some embodiments, each wing region independently comprises at least 16 natural phosphate linkages. In some embodiments, each wing region independently comprises at least 17 natural phosphate linkages. In some embodiments, each wing region independently comprises at least 18 natural phosphate linkages. In some embodiments, each wing region independently comprises at least 19 natural phosphate linkages. In some embodiments, each wing region independently comprises at least 20 natural phosphate linkages.

[0910] In some embodiments, each wing region independently comprises one natural phosphate linkage. In some embodiments, each wing region independently comprises two natural phosphate linkages. In some embodiments, each wing region independently comprises three natural phosphate linkages. In some embodiments, each wing region independently comprises four natural phosphate linkages. In some embodiments, each wing region independently comprises five natural phosphate linkages. In some embodiments, each wing region independently comprises six natural phosphate linkages. In some embodiments, each wing region independently comprises seven natural phosphate linkages. In some embodiments, each wing region independently comprises eight natural phosphate linkages. In some embodiments, each wing region independently comprises nine natural phosphate linkages. In some embodiments, each wing region independently comprises ten natural phosphate linkages. In some embodiments, each wing region independently comprises 11 natural phosphate linkages. In some embodiments, each wing region independently comprises 12 natural phosphate linkages. In some embodiments, each wing region independently comprises 13 natural phosphate linkages. In some embodiments, each wing region independently comprises 14 natural phosphate linkages. In some embodiments, each wing region independently comprises 15 natural phosphate linkages. In some embodiments, each wing region independently comprises 16 natural phosphate linkages. In some embodiments, each wing region independently comprises 17 natural phosphate linkages. In some embodiments, each wing region independently comprises 18 natural phosphate linkages. In some embodiments, each wing region independently comprises 19 natural phosphate linkages. In some embodiments, each wing region independently comprises 20 natural phosphate linkages.

[0911] In some embodiments, each wing region independently comprises at least one consecutive natural phosphate linkage. In some embodiments, each wing region independently comprises at least two consecutive natural phosphate linkages. In some embodiments, each wing region independently comprises at least three consecutive natural phosphate linkages. In some embodiments, each wing region independently comprises at least four consecutive natural phosphate linkages. In some embodiments, each wing region independently comprises at least five consecutive natural phosphate linkages. In some embodiments, each wing region independently comprises at least six consecutive natural phosphate linkages. In some embodiments, each wing region independently comprises at least seven consecutive natural phosphate linkages. In some embodiments, each wing region independently comprises at least eight consecutive natural phosphate linkages. In some embodiments, each wing region independently comprises at least nine consecutive natural phosphate linkages. In some embodiments, each wing region independently comprises at least ten consecutive natural phosphate linkages. In some embodiments, each wing region independently comprises at least 11 consecutive natural phosphate linkages. In some embodiments, each wing region independently comprises at least 12 consecutive natural phosphate linkages. In some embodiments, each wing region independently comprises at least 13 consecutive natural phosphate linkages. In some embodiments, each wing region independently comprises at least 14 consecutive natural phosphate linkages. In some embodiments, each wing region independently comprises at least 15 consecutive natural phosphate linkages. In some embodiments, each wing region independently comprises at least 16 consecutive natural phosphate linkages. In some embodiments, each wing region independently comprises at least 17 consecutive natural phosphate linkages. In some embodiments, each wing region independently comprises at least 18 consecutive natural phosphate linkages. In some embodiments, each wing region independently comprises at least 19 consecutive natural phosphate linkages. In some embodiments, each wing region independently comprises at least 20 consecutive natural phosphate linkages.

[0912] In some embodiments, each wing region independently comprises one consecutive natural phosphate linkage. In some embodiments, each wing region independently comprises two consecutive natural phosphate linkages. In some embodiments, each wing region independently comprises three consecutive natural phosphate linkages. In some embodiments, each wing region independently comprises four consecutive natural phosphate linkages. In some embodiments, each wing region independently comprises five consecutive natural phosphate linkages. In some embodiments, each wing region independently comprises six consecutive natural phosphate linkages. In some embodiments, each wing region independently comprises seven consecutive natural phosphate linkages. In some embodiments, each wing region independently comprises eight consecutive natural phosphate linkages. In some embodiments, each wing region independently comprises nine consecutive natural phosphate linkages. In some embodiments, each wing region independently comprises ten consecutive natural phosphate linkages. In some embodiments, each wing region independently comprises 11 consecutive natural phosphate linkages. In some embodiments, each wing region independently comprises 12 consecutive natural phosphate linkages. In some embodiments, each wing region independently comprises 13 consecutive natural phosphate linkages. In some embodiments, each wing region independently comprises 14 consecutive natural phosphate linkages. In some embodiments, each wing region independently comprises 15 consecutive natural phosphate linkages. In some embodiments, each wing region independently comprises 16 consecutive natural phosphate linkages. In some embodiments, each wing region independently comprises 17 consecutive natural phosphate linkages. In some embodiments, each wing region independently comprises 18 consecutive natural phosphate linkages. In some embodiments, each wing region independently comprises 19 consecutive natural phosphate linkages. In some embodiments, each wing region independently comprises 20 consecutive natural phosphate linkages.

[0913] In some embodiments, a wing is to the 5′-end of a core (5′-end wing). In some embodiments, a wing is to the 3′-end of a core (3′-end wing).

[0914] In some embodiments, a 5′-end wing comprises one or more modified internucleotidic linkages and one or more natural phosphate internucleotidic linkages. In some embodiments, a 3′-end wing comprises one or more modified internucleotidic linkages and one or more natural phosphate internucleotidic linkages. In some embodiments, each wing independently comprises one or more modified internucleotidic linkages and one or more natural phosphate internucleotidic linkages.

[0915] In some embodiments, a 5′-end wing comprises a modified internucleotidic linkage having one or more natural phosphate linkages connecting two or more nucleosides after (to the 3′-end) the modified internucleotidic linkage in the 5′-end wing. For example, a 5′-end wing mG*SmGmCmAmC comprises a modified internucleotidic linkage (mG*SmG) which has three natural phosphate linkages connecting four nucleosides (mGmCmAmC) after the modified internucleotidic linkage in the 5′-end wing. In some embodiments, a 5′-end wing comprises a modified internucleotidic linkages followed by one or more natural phosphate linkages and/or one or more modified internucleotidic linkages, which are followed by one or more natural phosphate linkages in the 5′-end wing (for example, mG*SmG and mG*SmC in mG*SmG*SmCmAmC). In some embodiments, a 5′-end wing comprises a modified internucleotidic linkages followed by one or more natural phosphate linkages in the 5′-end wing. In some embodiments, a 5′-end wing comprises a modified internucleotidic linkages followed by one or more consecutive natural phosphate linkages in the 5′-end wing. In some embodiments, a 5′-end wing comprises a natural phosphate linkage between the two nucleosides at its 3′-end. For example, a 5′-end wing mG*SmGmCmAmC has a natural phosphate linkage between the two nucleosides at its 3′-end (mG*SmGmCmAmC).

[0916] In some embodiments, a 3′-end wing comprises a modified internucleotidic linkage having one or more natural phosphate linkages connecting two or more nucleosides before (to the 5′-end) the modified internucleotidic linkage in the 3′-end wing. For example, a 3′-end wing mAmCmUmU*SmC comprises a modified internucleotidic linkage (mU*SmC) which has three natural phosphate linkages connecting four nucleosides (mAmCmUmU) before the modified internucleotidic linkage in the 3′-end wing. In some embodiments, a 3′-end wing comprises a modified internucleotidic linkages preceded by one or more natural phosphate linkages and/or one or more modified internucleotidic linkages, which are preceded by one or more natural phosphate linkages in the 3′-end wing (for example, mU*SmU and mU*SmC in mAmCmU*SmU*SmC). In some embodiments, a 3′-end wing comprises a modified internucleotidic linkages preceded by one or more natural phosphate linkages in the 3′-end wing. In some embodiments, a 3′-end wing comprises a modified internucleotidic linkages preceded by one or more consecutive natural phosphate linkages in the 3′-end wing. In some embodiments, a 3′-end wing comprises a natural phosphate linkage between the two nucleosides at its 5′-end. For example, a 3′-end wing having the structure of mAmCmUmU*SmC has a natural phosphate linkage between the two nucleosides at its 5′-end (mAmCmUmU*SmC).

[0917] In some embodiments, one or more is one. In some embodiments, one or more is two. In some embodiments, one or more is three. In some embodiments, one or more is four. In some embodiments, one or more is five. In some embodiments, one or more is six. In some embodiments, one or more is seven. In some embodiments, one or more is eight. In some embodiments, one or more is nine. In some embodiments, one or more is ten. In some embodiments, one or more is at least one. In some embodiments, one or more is at least two. In some embodiments, one or more is at least three. In some embodiments, one or more is at least four. In some embodiments, one or more is at least five. In some embodiments, one or more is at least six. In some embodiments, one or more is at least seven. In some embodiments, one or more is at least eight. In some embodiments, one or more is at least nine. In some embodiments, one or more is at least ten.

[0918] In some embodiments, a wing comprises only one chiral internucleotidic linkage. In some embodiments, a 5′-end wing comprises only one chiral internucleotidic linkage. In some embodiments, a 5′-end wing comprises only one chiral internucleotidic linkage at the 5′-end of the wing. In some embodiments, a 5′-end wing comprises only one chiral internucleotidic linkage at the 5′-end of the wing, and the chiral internucleotidic linkage is Rp. In some embodiments, a 5′-end wing comprises only one chiral internucleotidic linkage at the 5′-end of the wing, and the chiral internucleotidic linkage is Sp. In some embodiments, a 3′-end wing comprises only one chiral internucleotidic linkage at the 3′-end of the wing. In some embodiments, a 3′-end wing comprises only one chiral internucleotidic linkage at the 3′-end of the wing, and the chiral internucleotidic linkage is Rp. In some embodiments, a 3′-end wing comprises only one chiral internucleotidic linkage at the 3′-end of the wing, and the chiral internucleotidic linkage is Sp.

[0919] In some embodiments, a wing comprises two or more natural phosphate linkages. In some embodiments, all phosphate linkages within a wing are consecutive, and there are no non-phosphate linkages between any two phosphate linkages within a wing.

[0920] In some embodiments, a linkage connecting a wing and a core is considered part of the core when describing linkages, e.g., linkage chemistry, linkage stereochemistry, etc.

[0921] In some embodiments, a 5′-internucleotidic linkage connected to a sugar moiety without a 2′-modification is a modified linkage. In some embodiments, a 5′-internucleotidic linkage connected to a sugar moiety without a 2′-modification is a linkage having the structure of formula I. In some embodiments, a 5′-internucleotidic linkage connected to a sugar moiety without a 2′-modification is phosphorothioate linkage. In some embodiments, a 5′-internucleotidic linkage connected to a sugar moiety without a 2′-modification is a substituted phosphorothioate linkage. In some embodiments, a 5′-internucleotidic linkage connected to a sugar moiety without a 2′-modification is a phosphorothioate triester linkage. In some embodiments, each 5′-internucleotidic linkage connected to a sugar moiety without a 2′-modification is a modified linkage. In some embodiments, each 5′-internucleotidic linkage connected to a sugar moiety without a 2′-modification is a linkage having the structure of formula I. In some embodiments, each 5′-internucleotidic linkage connected to a sugar moiety without a 2′-modification is phosphorothioate linkage. In some embodiments, each 5′-internucleotidic linkage connected to a sugar moiety without a 2′-modification is a substituted phosphorothioate linkage. In some embodiments, each 5′-internucleotidic linkage connected to a sugar moiety without a 2′-modification is a phosphorothioate triester linkage.

[0922] In some embodiments, a 3′-internucleotidic linkage connected to a sugar moiety without a 2′-modification is a modified linkage. In some embodiments, a 3′-internucleotidic linkage connected to a sugar moiety without a 2′-modification is a linkage having the structure of formula I. In some embodiments, a 3′-internucleotidic linkage connected to a sugar moiety without a 2′-modification is phosphorothioate linkage. In some embodiments, a 3′-internucleotidic linkage connected to a sugar moiety without a 2′-modification is a substituted phosphorothioate linkage. In some embodiments, a 3′-internucleotidic linkage connected to a sugar moiety without a 2′-modification is a phosphorothioate triester linkage. In some embodiments, each 3′-internucleotidic linkage connected to a sugar moiety without a 2′-modification is a modified linkage. In some embodiments, each 3′-internucleotidic linkage connected to a sugar moiety without a 2′-modification is a linkage having the structure of formula I. In some embodiments, each 3′-internucleotidic linkage connected to a sugar moiety without a 2′-modification is phosphorothioate linkage. In some embodiments, each 3′-internucleotidic linkage connected to a sugar moiety without a 2′-modification is a substituted phosphorothioate linkage. In some embodiments, each 3′-internucleotidic linkage connected to a sugar moiety without a 2′-modification is a phosphorothioate triester linkage.

[0923] In some embodiments, both internucleotidic linkages connected to a sugar moiety without a 2′-modification are modified linkages. In some embodiments, both internucleotidic linkages connected to a sugar moiety without a 2′-modification are linkage having the structure of formula I. In some embodiments, both internucleotidic linkages connected to a sugar moiety without a 2′-modification are phosphorothioate linkages. In some embodiments, both internucleotidic linkages connected to a sugar moiety without a 2′-modification are substituted phosphorothioate linkages. In some embodiments, both internucleotidic linkages connected to a sugar moiety without a 2′-modification are phosphorothioate triester linkages. In some embodiments, each internucleotidic linkage connected to a sugar moiety without a 2′-modification is a modified linkage. In some embodiments, each internucleotidic linkage connected to a sugar moiety without a 2′-modification is a linkage having the structure of formula I. In some embodiments, each internucleotidic linkage connected to a sugar moiety without a 2′-modification is phosphorothioate linkage. In some embodiments, each internucleotidic linkage connected to a sugar moiety without a 2′-modification is a substituted phosphorothioate linkage. In some embodiments, each internucleotidic linkage connected to a sugar moiety without a 2′-modification is a phosphorothioate triester linkage.

[0924] In some embodiments, a sugar moiety without a 2′-modification is a sugar moiety found in a natural DNA nucleoside.

[0925] In some embodiments, for a wing-core-wing structure, the 5′-end wing comprises only one chiral internucleotidic linkage. In some embodiments, for a wing-core-wing structure, the 5′-end wing comprises only one chiral internucleotidic linkage at the 5′-end of the wing. In some embodiments, for a wing-core-wing structure, the 3′-end wing comprises only one chiral internucleotidic linkage. In some embodiments, for a wing-core-wing structure, the 3′-end wing comprises only one chiral internucleotidic linkage at the 3′-end of the wing. In some embodiments, for a wing-core-wing structure, each wing comprises only one chiral internucleotidic linkage. In some embodiments, for a wing-core-wing structure, each wing comprises only one chiral internucleotidic linkage, wherein the 5′-end wing comprises only one chiral internucleotidic linkage at its 5′-end; and the 3′-end wing comprises only one chiral internucleotidic linkage at its 3′-end. In some embodiments, the only chiral internucleotidic linkage in the 5′-wing is Rp. In some embodiments, the only chiral internucleotidic linkage in the 5′-wing is Sp. In some embodiments, the only chiral internucleotidic linkage in the 3′-wing is Rp. In some embodiments, the only chiral internucleotidic linkage in the 3′-wing is Sp. In some embodiments, the only chiral internucleotidic linkage in both the 5′- and the 3′-wings are Sp. In some embodiments, the only chiral internucleotidic linkage in both the 5′- and the 3′-wings are Rp. In some embodiments, the only chiral internucleotidic linkage in the 5′-wing is Sp, and the only chiral internucleotidic linkage in the 3′-wing is Rp. In some embodiments, the only chiral internucleotidic linkage in the 5′-wing is Rp, and the only chiral internucleotidic linkage in the 3′-wing is Sp.

[0926] In some embodiments, a wing comprises two chiral internucleotidic linkages. In some embodiments, a wing comprises only two chiral internucleotidic linkages, and one or more natural phosphate linkages. In some embodiments, a wing comprises only two chiral internucleotidic linkages, and two or more natural phosphate linkages. In some embodiments, a wing comprises only two chiral internucleotidic linkages, and two or more consecutive natural phosphate linkages. In some embodiments, a wing comprises only two chiral internucleotidic linkages, and two consecutive natural phosphate linkages. In some embodiments, a wing comprises only two chiral internucleotidic linkages, and three consecutive natural phosphate linkages. In some embodiments, a 5′-wing (to a core) comprises only two chiral internucleotidic linkages, one at its 5′-end and the other at its 3′-end, with one or more natural phosphate linkages in between. In some embodiments, a 5′-wing (to a core) comprises only two chiral internucleotidic linkages, one at its 5′-end and the other at its 3′-end, with two or more natural phosphate linkages in between. In some embodiments, a 3′-wing (to a core) comprises only two chiral internucleotidic linkages, one at its 3′-end and the other at its 3′-end, with one or more natural phosphate linkages in between. In some embodiments, a 3′-wing (to a core) comprises only two chiral internucleotidic linkages, one at its 3′-end and the other at its 3′-end, with two or more natural phosphate linkages in between.

[0927] In some embodiments, a 5′-wing comprises only two chiral internucleotidic linkages, one at its 5′-end and the other at its 3′-end, with one or more natural phosphate linkages in between, and the 3′-wing comprise only one internucleotidic linkage at its 3′-end. In some embodiments, a 5′-wing (to a core) comprises only two chiral internucleotidic linkages, one at its 5′-end and the other at its 3′-end, with two or more natural phosphate linkages in between, and the 3′-wing comprise only one internucleotidic linkage at its 3′-end. In some embodiments, each chiral internucleotidic linkage independently has its own stereochemistry. In some embodiments, both chiral internucleotidic linkages in the 5′-wing have the same stereochemistry. In some embodiments, both chiral internucleotidic linkages in the 5′-wing have different stereochemistry. In some embodiments, both chiral internucleotidic linkages in the 5′-wing are Rp. In some embodiments, both chiral internucleotidic linkages in the 5′-wing are Sp. In some embodiments, chiral internucleotidic linkages in the 5′- and 3′-wings have the same stereochemistry. In some embodiments, chiral internucleotidic linkages in the 5′- and 3′-wings are Rp. In some embodiments, chiral internucleotidic linkages in the 5′- and 3′-wings are Sp. In some embodiments, chiral internucleotidic linkages in the 5′- and 3′-wings have different stereochemistry.

[0928] In some embodiments, a chiral, modified phosphate linkage is a chiral phosphorothioate linkage, i.e., phosphorothioate internucleotidic linkage. In some embodiments, a wing region comprises at least 5%, 10%, 15%, 20%, 25%, 30%, 35%, 40%, 45%, 50%, 55%, 60%, 65%, 70%, 75%, 80%, 85%, 90%, 95%, or 100% chiral phosphorothioate internucleotidic linkages. In some embodiments, all chiral, modified phosphate linkages are chiral phosphorothioate internucleotidic linkages. In some embodiments, at least about 10%, 20%, 30%, 40%, 50%, 60%, 70%, 80%, or 90% chiral phosphorothioate internucleotidic linkages of a wing region are of the Sp conformation. In some embodiments, at least about 10% chiral phosphorothioate internucleotidic linkages of a wing region are of the Sp conformation. In some embodiments, at least about 20% chiral phosphorothioate internucleotidic linkages of a wing region are of the Sp conformation. In some embodiments, at least about 30% chiral phosphorothioate internucleotidic linkages of a wing region are of the Sp conformation. In some embodiments, at least about 40% chiral phosphorothioate internucleotidic linkages of a wing region are of the Sp conformation. In some embodiments, at least about 50% chiral phosphorothioate internucleotidic linkages of a wing region are of the Sp conformation. In some embodiments, at least about 60% chiral phosphorothioate internucleotidic linkages of a wing region are of the Sp conformation. In some embodiments, at least about 70% chiral phosphorothioate internucleotidic linkages of a wing region are of the Sp conformation. In some embodiments, at least about 80% chiral phosphorothioate internucleotidic linkages of a wing region are of the Sp conformation. In some embodiments, at least about 90% chiral phosphorothioate internucleotidic linkages of a wing region are of the Sp conformation. In some embodiments, at least about 95% chiral phosphorothioate internucleotidic linkages of a wing region are of the Sp conformation.

[0929] In some embodiments, at least about 1 chiral phosphorothioate internucleotidic linkage of a wing region is of the Sp conformation. In some embodiments, at least about 2 chiral phosphorothioate internucleotidic linkages of a wing region are of the Sp conformation. In some embodiments, at least about 3 chiral phosphorothioate internucleotidic linkages of a wing region are of the Sp conformation. In some embodiments, at least about 4 chiral phosphorothioate internucleotidic linkages of a wing region are of the Sp conformation. In some embodiments, at least about 5 chiral phosphorothioate internucleotidic linkages of a wing region are of the Sp conformation. In some embodiments, at least about 6 chiral phosphorothioate internucleotidic linkages of a wing region are of the Sp conformation. In some embodiments, at least about 7 chiral phosphorothioate internucleotidic linkages of a wing region are of the Sp conformation. In some embodiments, at least about 8 chiral phosphorothioate internucleotidic linkages of a wing region are of the Sp conformation. In some embodiments, at least about 9 chiral phosphorothioate internucleotidic linkages of a wing region are of the Sp conformation.

[0930] In some embodiments, at least about 2 consecutive chiral phosphorothioate internucleotidic linkages of a wing region are of the Sp conformation. In some embodiments, at least about 3 consecutive chiral phosphorothioate internucleotidic linkages of a wing region are of the Sp conformation. In some embodiments, at least about 4 consecutive chiral phosphorothioate internucleotidic linkages of a wing region are of the Sp conformation. In some embodiments, at least about 5 consecutive chiral phosphorothioate internucleotidic linkages of a wing region are of the Sp conformation. In some embodiments, at least about 6 consecutive chiral phosphorothioate internucleotidic linkages of a wing region are of the Sp conformation. In some embodiments, at least about 7 consecutive chiral phosphorothioate internucleotidic linkages of a wing region are of the Sp conformation. In some embodiments, at least about 8 consecutive chiral phosphorothioate internucleotidic linkages of a wing region are of the Sp conformation. In some embodiments, at least about 9 consecutive chiral phosphorothioate internucleotidic linkages of a wing region are of the Sp conformation.

[0931] In some embodiments, at least about 10%, 20%, 30%, 40%, 50%, 60%, 70%, 80%, or 90% chiral phosphorothioate internucleotidic linkages of a wing region are of the Rp conformation. In some embodiments, at least about 10% chiral phosphorothioate internucleotidic linkages of a wing region are of the Rp conformation. In some embodiments, at least about 20% chiral phosphorothioate internucleotidic linkages of a wing region are of the Rp conformation. In some embodiments, at least about 30% chiral phosphorothioate internucleotidic linkages of a wing region are of the Rp conformation. In some embodiments, at least about 40% chiral phosphorothioate internucleotidic linkages of a wing region are of the Rp conformation. In some embodiments, at least about 50% chiral phosphorothioate internucleotidic linkages of a wing region are of the Rp conformation. In some embodiments, at least about 60% chiral phosphorothioate internucleotidic linkages of a wing region are of the Rp conformation. In some embodiments, at least about 70% chiral phosphorothioate internucleotidic linkages of a wing region are of the Rp conformation. In some embodiments, at least about 80% chiral phosphorothioate internucleotidic linkages of a wing region are of the Rp conformation. In some embodiments, at least about 90% chiral phosphorothioate internucleotidic linkages of a wing region are of the Rp conformation. In some embodiments, at least about 95% chiral phosphorothioate internucleotidic linkages of a wing region are of the Rp conformation.

[0932] In some embodiments, less than about 10%, 20%, 30%, 40%, 50%, 60%, 70%, 80%, or 90% chiral phosphorothioate internucleotidic linkages of a wing region are of the Rp conformation. In some embodiments, less than about 10% chiral phosphorothioate internucleotidic linkages of a wing region are of the Rp conformation. In some embodiments, less than about 20% chiral phosphorothioate internucleotidic linkages of a wing region are of the Rp conformation. In some embodiments, less than about 30% chiral phosphorothioate internucleotidic linkages of a wing region are of the Rp conformation. In some embodiments, less than about 40% chiral phosphorothioate internucleotidic linkages of a wing region are of the Rp conformation. In some embodiments, less than about 50% chiral phosphorothioate internucleotidic linkages of a wing region are of the Rp conformation. In some embodiments, less than about 60% chiral phosphorothioate internucleotidic linkages of a wing region are of the Rp conformation. In some embodiments, less than about 70% chiral phosphorothioate internucleotidic linkages of a wing region are of the Rp conformation. In some embodiments, less than about 80% chiral phosphorothioate internucleotidic linkages of a wing region are of the Rp conformation. In some embodiments, less than about 90% chiral phosphorothioate internucleotidic linkages of a wing region are of the Rp conformation. In some embodiments, less than about 95% chiral phosphorothioate internucleotidic linkages of a wing region are of the Rp conformation. In some embodiments, a wing region has only one Rp chiral phosphorothioate internucleotidic linkages. In some embodiments, a wing region has only one Rp chiral phosphorothioate internucleotidic linkages, wherein all internucleotide linkages are chiral phosphorothioate internucleotidic linkages.

[0933] In some embodiments, at least about 1 chiral phosphorothioate internucleotidic linkage of a wing region is of the Rp conformation. In some embodiments, at least about 2 chiral phosphorothioate internucleotidic linkages of a wing region are of the Rp conformation. In some embodiments, at least about 3 chiral phosphorothioate internucleotidic linkages of a wing region are of the Rp conformation. In some embodiments, at least about 4 chiral phosphorothioate internucleotidic linkages of a wing region are of the Rp conformation. In some embodiments, at least about 5 chiral phosphorothioate internucleotidic linkages of a wing region are of the Rp conformation. In some embodiments, at least about 6 chiral phosphorothioate internucleotidic linkages of a wing region are of the Rp conformation. In some embodiments, at least about 7 chiral phosphorothioate internucleotidic linkages of a wing region are of the Rp conformation. In some embodiments, at least about 8 chiral phosphorothioate internucleotidic linkages of a wing region are of the Rp conformation. In some embodiments, at least about 9 chiral phosphorothioate internucleotidic linkages of a wing region are of the Rp conformation.

[0934] In some embodiments, at least about 2 consecutive chiral phosphorothioate internucleotidic linkages of a wing region are of the Rp conformation. In some embodiments, at least about 3 consecutive chiral phosphorothioate internucleotidic linkages of a wing region are of the Rp conformation. In some embodiments, at least about 4 consecutive chiral phosphorothioate internucleotidic linkages of a wing region are of the Rp conformation. In some embodiments, at least about 5 consecutive chiral phosphorothioate internucleotidic linkages of a wing region are of the Rp conformation. In some embodiments, at least about 6 consecutive chiral phosphorothioate internucleotidic linkages of a wing region are of the Rp conformation. In some embodiments, at least about 7 consecutive chiral phosphorothioate internucleotidic linkages of a wing region are of the Rp conformation. In some embodiments, at least about 8 consecutive chiral phosphorothioate internucleotidic linkages of a wing region are of the Rp conformation. In some embodiments, at least about 9 consecutive chiral phosphorothioate internucleotidic linkages of a wing region are of the Rp conformation.

[0935] In some embodiments, a wing comprises one or more modified sugar moieties. In some embodiments, a wing comprises two or more modified sugar moieties. In some embodiments, a wing comprises three or more modified sugar moieties. In some embodiments, a wing comprises four or more modified sugar moieties. In some embodiments, a wing comprises five or more modified sugar moieties. In some embodiments, a wing comprises six or more modified sugar moieties. In some embodiments, a wing comprises seven or more modified sugar moieties. In some embodiments, a wing comprises eight or more modified sugar moieties. In some embodiments, a wing comprises nine or more modified sugar moieties. In some embodiments, a wing comprises ten or more modified sugar moieties. In some embodiments, a wing comprises 11 or more modified sugar moieties. In some embodiments, a wing comprises 12 or more modified sugar moieties. In some embodiments, a wing comprises 13 or more modified sugar moieties. In some embodiments, a wing comprises 14 or more modified sugar moieties. In some embodiments, a wing comprises 15 or more modified sugar moieties. In some embodiments, a wing comprises 16 or more modified sugar moieties. In some embodiments, a wing comprises 17 or more modified sugar moieties. In some embodiments, a wing comprises 18 or more modified sugar moieties. In some embodiments, a wing comprises 19 or more modified sugar moieties. In some embodiments, a wing comprises 20 or more modified sugar moieties. In some embodiments, a wing comprises 21 or more modified sugar moieties. In some embodiments, a wing comprises 22 or more modified sugar moieties. In some embodiments, a wing comprises 23 or more modified sugar moieties. In some embodiments, a wing comprises 24 or more modified sugar moieties. In some embodiments, a wing comprises 25 or more modified sugar moieties. In some embodiments, a wing comprises 30 or more modified sugar moieties. In some embodiments, a wing comprises 35 or more modified sugar moieties.

[0936] In some embodiments, a wing comprises one or more 2′-modified sugar moieties. In some embodiments, a wing comprises two or more 2′-modified sugar moieties. In some embodiments, a wing comprises three or more 2′-modified sugar moieties. In some embodiments, a wing comprises four or more 2′-modified sugar moieties. In some embodiments, a wing comprises five or more 2′-modified sugar moieties. In some embodiments, a wing comprises six or more 2′-modified sugar moieties. In some embodiments, a wing comprises seven or more 2′-modified sugar moieties. In some embodiments, a wing comprises eight or more 2′-modified sugar moieties. In some embodiments, a wing comprises nine or more 2′-modified sugar moieties. In some embodiments, a wing comprises ten or more 2′-modified sugar moieties. In some embodiments, a wing comprises 11 or more 2′-modified sugar moieties. In some embodiments, a wing comprises 12 or more 2′-modified sugar moieties. In some embodiments, a wing comprises 13 or more 2′-modified sugar moieties. In some embodiments, a wing comprises 14 or more 2′-modified sugar moieties. In some embodiments, a wing comprises 15 or more 2′-modified sugar moieties. In some embodiments, a wing comprises 16 or more 2′-modified sugar moieties. In some embodiments, a wing comprises 17 or more 2′-modified sugar moieties. In some embodiments, a wing comprises 18 or more 2′-modified sugar moieties. In some embodiments, a wing comprises 19 or more 2′-modified sugar moieties. In some embodiments, a wing comprises 20 or more 2′-modified sugar moieties. In some embodiments, a wing comprises 21 or more 2′-modified sugar moieties. In some embodiments, a wing comprises 22 or more 2′-modified sugar moieties. In some embodiments, a wing comprises 23 or more 2′-modified sugar moieties. In some embodiments, a wing comprises 24 or more 2′-modified sugar moieties. In some embodiments, a wing comprises 25 or more 2′-modified sugar moieties. In some embodiments, a wing comprises 30 or more 2′-modified sugar moieties. In some embodiments, a wing comprises 35 or more 2′-modified sugar moieties.

[0937] In some embodiments, a wing comprises one or more 2′-F. In some embodiments, a wing comprises two or more 2′-F. In some embodiments, a wing comprises three or more 2′-F. In some embodiments, a wing comprises four or more 2′-F. In some embodiments, a wing comprises five or more 2′-F. In some embodiments, a wing comprises six or more 2′-F. In some embodiments, a wing comprises seven or more 2′-F. In some embodiments, a wing comprises eight or more 2′-F. In some embodiments, a wing comprises nine or more 2′-F. In some embodiments, a wing comprises ten or more 2′-F. In some embodiments, a wing comprises 11 or more 2′-F. In some embodiments, a wing comprises 12 or more 2′-F. In some embodiments, a wing comprises 13 or more 2′-F. In some embodiments, a wing comprises 14 or more 2′-F. In some embodiments, a wing comprises 15 or more 2′-F. In some embodiments, a wing comprises 16 or more 2′-F. In some embodiments, a wing comprises 17 or more 2′-F. In some embodiments, a wing comprises 18 or more 2′-F. In some embodiments, a wing comprises 19 or more 2′-F. In some embodiments, a wing comprises 20 or more 2′-F. In some embodiments, a wing comprises 21 or more 2′-F. In some embodiments, a wing comprises 22 or more 2′-F. In some embodiments, a wing comprises 23 or more 2′-F. In some embodiments, a wing comprises 24 or more 2′-F. In some embodiments, a wing comprises 25 or more 2′-F. In some embodiments, a wing comprises 30 or more 2′-F. In some embodiments, a wing comprises 35 or more 2′-F.

[0938] In some embodiments, a wing comprises one 2′-F. In some embodiments, a wing comprises two 2′-F. In some embodiments, a wing comprises three 2′-F. In some embodiments, a wing comprises four 2′-F. In some embodiments, a wing comprises five 2′-F. In some embodiments, a wing comprises six 2′-F. In some embodiments, a wing comprises seven 2′-F. In some embodiments, a wing comprises eight 2′-F. In some embodiments, a wing comprises nine 2′-F. In some embodiments, a wing comprises ten 2′-F. In some embodiments, a wing comprises 11 2′-F. In some embodiments, a wing comprises 12 2′-F. In some embodiments, a wing comprises 13 2′-F. In some embodiments, a wing comprises 14 2′-F. In some embodiments, a wing comprises 15 2′-F. In some embodiments, a wing comprises 16 2′-F. In some embodiments, a wing comprises 17 2′-F. In some embodiments, a wing comprises 18 2′—F. In some embodiments, a wing comprises 19 2′-F. In some embodiments, a wing comprises 20 2′-F. In some embodiments, a wing comprises 21 2′-F. In some embodiments, a wing comprises 22 2′-F. In some embodiments, a wing comprises 23 2′-F. In some embodiments, a wing comprises 24 2′-F. In some embodiments, a wing comprises 25 2′-F. In some embodiments, a wing comprises 30 2′-F. In some embodiments, a wing comprises 35 2′-F.

[0939] In some embodiments, a wing comprises one or more consecutive 2′-F. In some embodiments, a wing comprises two or more consecutive 2′-F. In some embodiments, a wing comprises three or more consecutive 2′-F. In some embodiments, a wing comprises four or more consecutive 2′-F. In some embodiments, a wing comprises five or more consecutive 2′-F. In some embodiments, a wing comprises six or more consecutive 2′-F. In some embodiments, a wing comprises seven or more consecutive 2′-F. In some embodiments, a wing comprises eight or more consecutive 2′-F. In some embodiments, a wing comprises nine or more consecutive 2′—F. In some embodiments, a wing comprises ten or more consecutive 2′-F. In some embodiments, a wing comprises 11 or more consecutive 2′-F. In some embodiments, a wing comprises 12 or more consecutive 2′-F. In some embodiments, a wing comprises 13 or more consecutive 2′-F. In some embodiments, a wing comprises 14 or more consecutive 2′-F. In some embodiments, a wing comprises 15 or more consecutive 2′-F. In some embodiments, a wing comprises 16 or more consecutive 2′-F. In some embodiments, a wing comprises 17 or more consecutive 2′-F. In some embodiments, a wing comprises 18 or more consecutive 2′-F. In some embodiments, a wing comprises 19 or more consecutive 2′-F. In some embodiments, a wing comprises 20 or more consecutive 2′-F. In some embodiments, a wing comprises 21 or more consecutive 2′-F. In some embodiments, a wing comprises 22 or more consecutive 2′-F. In some embodiments, a wing comprises 23 or more consecutive 2′-F. In some embodiments, a wing comprises 24 or more consecutive 2′-F. In some embodiments, a wing comprises 25 or more consecutive 2′-F. In some embodiments, a wing comprises 30 or more consecutive 2′-F. In some embodiments, a wing comprises 35 or more consecutive 2′-F.

[0940] In some embodiments, a wing comprises one consecutive 2′-F. In some embodiments, a wing comprises two consecutive 2′-F. In some embodiments, a wing comprises three consecutive 2′-F. In some embodiments, a wing comprises four consecutive 2′-F. In some embodiments, a wing comprises five consecutive 2′-F. In some embodiments, a wing comprises six consecutive 2′-F. In some embodiments, a wing comprises seven consecutive 2′-F. In some embodiments, a wing comprises eight consecutive 2′-F. In some embodiments, a wing comprises nine consecutive 2′-F. In some embodiments, a wing comprises ten consecutive 2′-F. In some embodiments, a wing comprises 11 consecutive 2′-F. In some embodiments, a wing comprises 12 consecutive 2′-F. In some embodiments, a wing comprises 13 consecutive 2′-F. In some embodiments, a wing comprises 14 consecutive 2′-F. In some embodiments, a wing comprises 15 consecutive 2′-F. In some embodiments, a wing comprises 16 consecutive 2′-F. In some embodiments, a wing comprises 17 consecutive 2′-F. In some embodiments, a wing comprises 18 consecutive 2′-F. In some embodiments, a wing comprises 19 consecutive 2′-F. In some embodiments, a wing comprises 20 consecutive 2′-F. In some embodiments, a wing comprises 21 consecutive 2′-F. In some embodiments, a wing comprises 22 consecutive 2′-F. In some embodiments, a wing comprises 23 consecutive 2′-F. In some embodiments, a wing comprises 24 consecutive 2′-F. In some embodiments, a wing comprises 25 consecutive 2′-F. In some embodiments, a wing comprises 30 consecutive 2′-F. In some embodiments, a wing comprises 35 consecutive 2′-F.

[0941] In some embodiments, a core region has a length of one or more bases. In some embodiments, a core region has a length of two or more bases. In some embodiments, a core region has a length of three or more bases. In some embodiments, a core region has a length of four or more bases. In some embodiments, a core region has a length of five or more bases. In some embodiments, a core region has a length of six or more bases. In some embodiments, a core region has a length of seven or more bases. In some embodiments, a core region has a length of eight or more bases. In some embodiments, a core region has a length of nine or more bases. In some embodiments, a core region has a length of ten or more bases. In some embodiments, a core region has a length of 11, 12, 13, 14, 15, 16, 17, 18, 19, 20, 25, or more bases. In certain embodiments, a core region has a length of 11 or more bases. In certain embodiments, a core region has a length of 12 or more bases. In certain embodiments, a core region has a length of 13 or more bases. In certain embodiments, a core region has a length of 14 or more bases. In certain embodiments, a core region has a length of 15 or more bases. In certain embodiments, a core region has a length of 16 or more bases. In certain embodiments, a core region has a length of 17 or more bases. In certain embodiments, a core region has a length of 18 or more bases. In certain embodiments, a core region has a length of 19 or more bases. In certain embodiments, a core region has a length of 20 or more bases. In certain embodiments, a core region has a length of more than 20 bases. In certain embodiments, a core region has a length of 2 bases. In certain embodiments, a core region has a length of 3 bases. In certain embodiments, a core region has a length of 4 bases. In certain embodiments, a core region has a length of 5 bases. In certain embodiments, a core region has a length of 6 bases. In certain embodiments, a core region has a length of 7 bases. In certain embodiments, a core region has a length of 8 bases. In certain embodiments, a core region has a length of 9 bases. In certain embodiments, a core region has a length of 10 bases. In certain embodiments, a core region has a length of 11 bases. In certain embodiments, a core region has a length of 12 bases. In certain embodiments, a core region has a length of 13 bases. In certain embodiments, a core region has a length of 14 bases. In certain embodiments, a core region has a length of 15 bases. In certain embodiments, a core region has a length of 16 bases. In certain embodiments, a core region has a length of 17 bases. In certain embodiments, a core region has a length of 18 bases. In certain embodiments, a core region has a length of 19 bases. In certain embodiments, a core region has a length of 20 bases.

[0942] In some embodiments, a core comprises one or more modified internucleotidic linkages. In some embodiments, a core comprises one or more natural phosphate linkages. In some embodiments, a core independently comprises one or more modified internucleotidic linkages and one or more natural phosphate linkages. In some embodiments, a core comprises no natural phosphate linkages. In some embodiments, each core linkage is a modified internucleotidic linkage.

[0943] In some embodiments, a core comprises at least one natural phosphate linkage. In some embodiments, a core comprises at least two modified internucleotidic linkages. In some embodiments, a core comprises at least three modified internucleotidic linkages. In some embodiments, a core comprises at least four modified internucleotidic linkages. In some embodiments, a core comprises at least five modified internucleotidic linkages. In some embodiments, a core comprises at least six modified internucleotidic linkages. In some embodiments, a core comprises at least seven modified internucleotidic linkages. In some embodiments, a core comprises at least eight modified internucleotidic linkages. In some embodiments, a core comprises at least nine modified internucleotidic linkages. In some embodiments, a core comprises at least ten modified internucleotidic linkages. In some embodiments, a core comprises at least 11 modified internucleotidic linkages. In some embodiments, a core comprises at least 12 modified internucleotidic linkages. In some embodiments, a core comprises at least 13 modified internucleotidic linkages. In some embodiments, a core comprises at least 14 modified internucleotidic linkages. In some embodiments, a core comprises at least 15 modified internucleotidic linkages. In some embodiments, a core comprises at least 16 modified internucleotidic linkages. In some embodiments, a core comprises at least 17 modified internucleotidic linkages. In some embodiments, a core comprises at least 18 modified internucleotidic linkages. In some embodiments, a core comprises at least 19 modified internucleotidic linkages. In some embodiments, a core comprises at least 20 modified internucleotidic linkages.

[0944] In some embodiments, a core comprises one or more chiral internucleotidic linkages. In some embodiments, a core comprises one or more natural phosphate linkages. In some embodiments, a core independently comprises one or more chiral internucleotidic linkages and one or more natural phosphate linkages. In some embodiments, a core comprises no natural phosphate linkages. In some embodiments, each core linkage is a chiral internucleotidic linkage.

[0945] In some embodiments, a core comprises at least one natural phosphate linkage. In some embodiments, a core comprises at least two chiral internucleotidic linkages. In some embodiments, a core comprises at least three chiral internucleotidic linkages. In some embodiments, a core comprises at least four chiral internucleotidic linkages. In some embodiments, a core comprises at least five chiral internucleotidic linkages. In some embodiments, a core comprises at least six chiral internucleotidic linkages. In some embodiments, a core comprises at least seven chiral internucleotidic linkages. In some embodiments, a core comprises at least eight chiral internucleotidic linkages. In some embodiments, a core comprises at least nine chiral internucleotidic linkages. In some embodiments, a core comprises at least ten chiral internucleotidic linkages. In some embodiments, a core comprises at least 11 chiral internucleotidic linkages. In some embodiments, a core comprises at least 12 chiral internucleotidic linkages. In some embodiments, a core comprises at least 13 chiral internucleotidic linkages. In some embodiments, a core comprises at least 14 chiral internucleotidic linkages. In some embodiments, a core comprises at least 15 chiral internucleotidic linkages. In some embodiments, a core comprises at least 16 chiral internucleotidic linkages. In some embodiments, a core comprises at least 17 chiral internucleotidic linkages. In some embodiments, a core comprises at least 18 chiral internucleotidic linkages. In some embodiments, a core comprises at least 19 chiral internucleotidic linkages. In some embodiments, a core comprises at least 20 chiral internucleotidic linkages.

[0946] In some embodiments, a core comprises one natural phosphate linkage. In some embodiments, a core comprises two chiral internucleotidic linkages. In some embodiments, a core comprises three chiral internucleotidic linkages. In some embodiments, a core comprises four chiral internucleotidic linkages. In some embodiments, a core comprises five chiral internucleotidic linkages. In some embodiments, a core comprises six chiral internucleotidic linkages. In some embodiments, a core comprises seven chiral internucleotidic linkages. In some embodiments, a core comprises eight chiral internucleotidic linkages. In some embodiments, a core comprises nine chiral internucleotidic linkages. In some embodiments, a core comprises ten chiral internucleotidic linkages. In some embodiments, a core comprises 11 chiral internucleotidic linkages. In some embodiments, a core comprises 12 chiral internucleotidic linkages. In some embodiments, a core comprises 13 chiral internucleotidic linkages. In some embodiments, a core comprises 14 chiral internucleotidic linkages. In some embodiments, a core comprises 15 chiral internucleotidic linkages. In some embodiments, a core comprises 16 chiral internucleotidic linkages. In some embodiments, a core comprises 17 chiral internucleotidic linkages. In some embodiments, a core comprises 18 chiral internucleotidic linkages. In some embodiments, a core comprises 19 chiral internucleotidic linkages. In some embodiments, a core comprises 20 chiral internucleotidic linkages.

[0947] In some embodiments, a core region has a pattern of backbone chiral centers comprising (Sp)m(Rp)n, (Rp)n(Sp)m, (Np)t(Rp)n(Sp)m, or (Sp)t(Rp)n(Sp)m, wherein each of m, n, t and Np is independently as defined and described in the present disclosure. In some embodiments, a core region has a pattern of backbone chiral centers comprising (Sp)m(Rp)n, (Rp)n(Sp)m, (Np)t(Rp)n(Sp)m, or (Sp)t(Rp)n(Sp)m. In some embodiments, a core region has a pattern of backbone chiral centers comprising (Sp)m(Rp)n. In some embodiments, a core region has a pattern of backbone chiral centers comprising (Sp)m(Rp)n, wherein m>2 and n is 1. In some embodiments, a core region has a pattern of backbone chiral centers comprising (Rp)n(Sp)m. In some embodiments, a core region has a pattern of backbone chiral centers comprising (Rp)n(Sp)m, wherein m>2 and n is 1. In some embodiments, a core region has a pattern of backbone chiral centers comprising (Np)t(Rp)n(Sp)m. In some embodiments, a core region has a pattern of backbone chiral centers comprising (Np)t(Rp)n(Sp)m, wherein m>2 and n is 1. In some embodiments, a core region has a pattern of backbone chiral centers comprising (Np)t(Rp)n(Sp)m, wherein t>2, m>2 and n is 1. In some embodiments, a core region has a pattern of backbone chiral centers comprising (Sp)t(Rp)n(Sp)m. In some embodiments, a core region has a pattern of backbone chiral centers comprising (Sp)t(Rp)n(Sp)m, wherein m>2 and n is 1. In some embodiments, a core region has a pattern of backbone chiral centers comprising (Sp)t(Rp)n(Sp)m, wherein t>2, m>2 and n is 1. Among other things, the present disclosure demonstrates that, in some embodiments, such patterns can provide and/or enhance controlled cleavage, improved cleavage rate, selectivity, etc., of a target sequence, e.g., an RNA sequence. Example patterns of backbone chiral centers are described in the present disclosure.

[0948] In some embodiments, at least 60% of the chiral internucleotidic linkages in the core region are Sp. In some embodiments, at least 65% of the chiral internucleotidic linkages in the core region are Sp. In some embodiments, at least 66% of the chiral internucleotidic linkages in the core region are Sp. In some embodiments, at least 67% of the chiral internucleotidic linkages in the core region are Sp. In some embodiments, at least 70% of the chiral internucleotidic linkages in the core region are Sp. In some embodiments, at least 75% of the chiral internucleotidic linkages in the core region are Sp. In some embodiments, at least 80% of the chiral internucleotidic linkages in the core region are Sp. In some embodiments, at least 85% of the chiral internucleotidic linkages in the core region are Sp. In some embodiments, at least 90% of the chiral internucleotidic linkages in the core region are Sp. In some embodiments, at least 95% of the chiral internucleotidic linkages in the core region are Sp. In some embodiments, each chiral internucleotidic linkages in the core region is Sp.

[0949] In some embodiments, at least 1 core region internucleotidic linkage is Sp. In some embodiments, at least 2 core region internucleotidic linkages are Sp. In some embodiments, at least 3 core region internucleotidic linkages are Sp. In some embodiments, at least 4 core region internucleotidic linkages are Sp. In some embodiments, at least 5 core region internucleotidic linkages are Sp. In some embodiments, at least 6 core region internucleotidic linkages are Sp. In some embodiments, at least 7 core region internucleotidic linkages are Sp. In some embodiments, at least 8 core region internucleotidic linkages are Sp. In some embodiments, at least 9 core region internucleotidic linkages are Sp. In some embodiments, at least 10 core region internucleotidic linkages are Sp. In some embodiments, at least 11 core region internucleotidic linkages are Sp. In some embodiments, at least 12 core region internucleotidic linkages are Sp. In some embodiments, at least 13 core region internucleotidic linkages are Sp. In some embodiments, at least 14 core region internucleotidic linkages are Sp. In some embodiments, at least 15 core region internucleotidic linkages are Sp. In some embodiments, at least 16 core region internucleotidic linkages are Sp. In some embodiments, at least 17 core region internucleotidic linkages are Sp. In some embodiments, at least 18 core region internucleotidic linkages are Sp. In some embodiments, at least 19 core region internucleotidic linkages are Sp. In some embodiments, at least 20 core region internucleotidic linkages are Sp. In some embodiments, at least 21 core region internucleotidic linkages are Sp. In some embodiments, at least two core region internucleotidic linkages are Sp. In some embodiments, the Sp internucleotidic linkages are consecutive.

[0950] In some embodiments, at least 60% of the chiral internucleotidic linkages in the core region are Rp. In some embodiments, at least 65% of the chiral internucleotidic linkages in the core region are Rp. In some embodiments, at least 66% of the chiral internucleotidic linkages in the core region are Rp. In some embodiments, at least 67% of the chiral internucleotidic linkages in the core region are Rp. In some embodiments, at least 70% of the chiral internucleotidic linkages in the core region are Rp. In some embodiments, at least 75% of the chiral internucleotidic linkages in the core region are Rp. In some embodiments, at least 80% of the chiral internucleotidic linkages in the core region are Rp. In some embodiments, at least 85% of the chiral internucleotidic linkages in the core region are Rp. In some emIn some embodiments, each chiral internucleotidic linkages in the core region is Rp.

[0951] In some embodiments, at least 1 core region internucleotidic linkage is Rp. In some embodiments, at least 2 core region internucleotidic linkages are Rp. In some embodiments, at least 3 core region internucleotidic linkages are Rp. In some embodiments, at least 4 core region internucleotidic linkages are Rp. In some embodiments, at least 5 core region internucleotidic linkages are Rp. In some embodiments, at least 6 core region internucleotidic linkages are Rp. In some embodiments, at least 7 core region internucleotidic linkages are Rp. In some embodiments, at least 8 core region internucleotidic linkages are Rp. In some embodiments, at least 9 core region internucleotidic linkages are Rp. In some embodiments, at least 10 core region internucleotidic linkages are Rp. In some embodiments, at least 11 core region internucleotidic linkages are Rp. In some embodiments, at least 12 core region internucleotidic linkages are Rp. In some embodiments, at least 13 core region internucleotidic linkages are Rp. In some embodiments, at least 14 core region internucleotidic linkages are Rp. In some embodiments, at least 15 core region internucleotidic linkages are Rp. In some embodiments, at least 16 core region internucleotidic linkages are Rp. In some embodiments, at least 17 core region internucleotidic linkages are Rp. In some embodiments, at least 18 core region internucleotidic linkages are Rp. In some embodiments, at least 19 core region internucleotidic linkages are Rp. In some embodiments, at least 20 core region internucleotidic linkages are Rp. In some embodiments, at least 21 core region internucleotidic linkages are Rp. In some embodiments, at least two core region internucleotidic linkages are Rp. In some embodiments, the Rp internucleotidic linkages are consecutive.

[0952] In some embodiments, a core comprises one or more modified sugar moieties. In some embodiments, a core comprises two or more modified sugar moieties. In some embodiments, a core comprises three or more modified sugar moieties. In some embodiments, a core comprises four or more modified sugar moieties. In some embodiments, a core comprises five or more modified sugar moieties. In some embodiments, a core comprises six or more modified sugar moieties. In some embodiments, a core comprises seven or more modified sugar moieties. In some embodiments, a core comprises eight or more modified sugar moieties. In some embodiments, a core comprises nine or more modified sugar moieties. In some embodiments, a core comprises ten or more modified sugar moieties. In some embodiments, a core comprises 11 or more modified sugar moieties. In some embodiments, a core comprises 12 or more modified sugar moieties. In some embodiments, a core comprises 13 or more modified sugar moieties. In some embodiments, a core comprises 14 or more modified sugar moieties. In some embodiments, a core comprises 15 or more modified sugar moieties. In some embodiments, a core comprises 16 or more modified sugar moieties. In some embodiments, a core comprises 17 or more modified sugar moieties. In some embodiments, a core comprises 18 or more modified sugar moieties. In some embodiments, a core comprises 19 or more modified sugar moieties. In some embodiments, a core comprises 20 or more modified sugar moieties. In some embodiments, a core comprises 21 or more modified sugar moieties. In some embodiments, a core comprises 22 or more modified sugar moieties. In some embodiments, a core comprises 23 or more modified sugar moieties. In some embodiments, a core comprises 24 or more modified sugar moieties. In some embodiments, a core comprises 25 or more modified sugar moieties. In some embodiments, a core comprises 30 or more modified sugar moieties. In some embodiments, a core comprises 35 or more modified sugar moieties. In some embodiments, a 2′-modification is 2′-OR¹. In some embodiments, a 2′-modification is 2′-OMe.

[0953] In some embodiments, a core comprises one or more 2′-modified sugar moieties. In some embodiments, a core comprises two or more 2′-modified sugar moieties. In some embodiments, a core comprises three or more 2′-modified sugar moieties. In some embodiments, a core comprises four or more 2′-modified sugar moieties. In some embodiments, a core comprises five or more 2′-modified sugar moieties. In some embodiments, a core comprises six or more 2′-modified sugar moieties. In some embodiments, a core comprises seven or more 2′-modified sugar moieties. In some embodiments, a core comprises eight or more 2′-modified sugar moieties. In some embodiments, a core comprises nine or more 2′-modified sugar moieties. In some embodiments, a core comprises ten or more 2′-modified sugar moieties. In some embodiments, a core comprises 11 or more 2′-modified sugar moieties. In some embodiments, a core comprises 12 or more 2′-modified sugar moieties. In some embodiments, a core comprises 13 or more 2′-modified sugar moieties. In some embodiments, a core comprises 14 or more 2′-modified sugar moieties. In some embodiments, a core comprises 15 or more 2′-modified sugar moieties. In some embodiments, a core comprises 16 or more 2′-modified sugar moieties. In some embodiments, a core comprises 17 or more 2′-modified sugar moieties. In some embodiments, a core comprises 18 or more 2′-modified sugar moieties. In some embodiments, a core comprises 19 or more 2′-modified sugar moieties. In some embodiments, a core comprises 20 or more 2′-modified sugar moieties. In some embodiments, a core comprises 21 or more 2′-modified sugar moieties. In some embodiments, a core comprises 22 or more 2′-modified sugar moieties. In some embodiments, a core comprises 23 or more 2′-modified sugar moieties. In some embodiments, a core comprises 24 or more 2′-modified sugar moieties. In some embodiments, a core comprises 25 or more 2′-modified sugar moieties. In some embodiments, a core comprises 30 or more 2′-modified sugar moieties. In some embodiments, a core comprises 35 or more 2′-modified sugar moieties. In some embodiments, a 2′-modification is 2′-OR¹. In some embodiments, a 2′-modification is 2′-OMe.

[0954] In some embodiments, a wing-core-wing (i.e., X—Y—X) motif is represented numerically as, e.g., 5-10-4, meaning the wing to the 5′-end of the core is 5 bases in length, the core region is 10 bases in length, and the wing region to the 3′-end of the core is 4-bases in length. In some embodiments, a wing-core-wing motif is any of, e.g. 2-16-2, 3-14-3, 4-12-4, 5-10-5, 2-9-6, 3-9-3, 3-9-4, 3-9-5, 4-7-4, 4-9-3, 4-9-4, 4-9-5, 4-10-5, 4-11-4, 4-11-5, 5- 7-5, 5-8-6, 8-7-5, 7-7-6, 5-9-3, 5-9-5, 5-10-4, 5-10-5, 6-7-6, 6-8-5, and 6-9-2, etc. In certain embodiments, a wing-core-wing motif is 5-10-5. In certain embodiments, a wing-core-wing motif is 7-7-6. In certain embodiments, a wing-core-wing motif is 8-7-5.

[0955] In some embodiments, a wing-core motif is 5-15, 6-14, 7-13, 8-12, 9-12, etc. In some embodiments, a core-wing motif is 5-15, 6-14, 7-13, 8-12, 9-12, etc.

[0956] In some embodiments, the internucleosidic linkages of provided oligonucleotides of such wing-core-wing (i.e., X—Y—X) motifs are all chiral, modified phosphate linkages. In some embodiments, the internucleosidic linkages of provided oligonucleotides of such wing-core-wing (i.e., X—Y—X) motifs are all chiral phosphorothioate internucleotidic linkages. In some embodiments, chiral internucleotidic linkages of provided oligonucleotides of such wing-core-wing motifs are at least about 10, 20, 30, 40, 50, 50, 70, 80, or 90% chiral, modified phosphate internucleotidic linkages. In some embodiments, chiral internucleotidic linkages of provided oligonucleotides of such wing-core-wing motifs are at least about 10, 20, 30, 40, 50, 60, 70, 80, or 90% chiral phosphorothioate internucleotidic linkages. In some embodiments, chiral internucleotidic linkages of provided oligonucleotides of such wing-core-wing motifs are at least about 10, 20, 30, 40, 50, 50, 70, 80, or 90% chiral phosphorothioate internucleotidic linkages of the Sp conformation.

[0957] In some embodiments, each wing region of a wing-core-wing motif optionally contains chiral, modified phosphate internucleotidic linkages. In some embodiments, each wing region of a wing-core-wing motif optionally contains chiral phosphorothioate internucleotidic linkages. In some embodiments, each wing region of a wing-core-wing motif contains chiral phosphorothioate internucleotidic linkages. In some embodiments, the two wing regions of a wing-core-wing motif have the same internucleotidic linkage stereochemistry. In some embodiments, the two wing regions have different internucleotidic linkage stereochemistry. In some embodiments, each internucleotidic linkage in the wings is independently a chiral internucleotidic linkage.

[0958] In some embodiments, the core region of a wing-core-wing motif optionally contains chiral, modified phosphate internucleotidic linkages. In some embodiments, the core region of a wing-core-wing motif optionally contains chiral phosphorothioate internucleotidic linkages. In some embodiments, the core region of a wing-core-wing motif comprises a repeating pattern of internucleotidic linkage stereochemistry. In some embodiments, the core region of a wing-core-wing motif has a repeating pattern of internucleotidic linkage stereochemistry. In some embodiments, the core region of a wing-core-wing motif comprises repeating pattern of internucleotidic linkage stereochemistry, wherein the repeating pattern is (Sp)mRp or Rp(Sp)m, wherein m is 1-50. In some embodiments, the core region of a wing-core-wing motif comprises repeating pattern of internucleotidic linkage stereochemistry, wherein the repeating pattern is (Sp)mRp or Rp(Sp)m, wherein m is 1-50. In some embodiments, the core region of a wing-core-wing motif comprises repeating pattern of internucleotidic linkage stereochemistry, wherein the repeating pattern is (Sp)mRp, wherein m is 1-50. In some embodiments, the core region of a wing-core-wing motif comprises repeating pattern of internucleotidic linkage stereochemistry, wherein the repeating pattern is Rp(Sp)m, wherein m is 1-50. In some embodiments, the core region of a wing-core-wing motif has repeating pattern of internucleotidic linkage stereochemistry, wherein the repeating pattern is (Sp)mRp or Rp(Sp)m, wherein m is 1-50. In some embodiments, the core region of a wing-core-wing motif has repeating pattern of internucleotidic linkage stereochemistry, wherein the repeating pattern is (Sp)mRp, wherein m is 1-50. In some embodiments, the core region of a wing-core-wing motif has repeating pattern of internucleotidic linkage stereochemistry, wherein the repeating pattern is Rp(Sp)m, wherein m is 1-50. In some embodiments, the core region of a wing-core-wing motif has repeating pattern of internucleotidic linkage stereochemistry, wherein the repeating pattern is a motif comprising at least 33% of internucleotidic linkage in the S conformation. In some embodiments, the core region of a wing-core-wing motif has repeating pattern of internucleotidic linkage stereochemistry, wherein the repeating pattern is a motif comprising at least 50% of internucleotidic linkage in the S conformation. In some embodiments, the core region of a wing-core-wing motif has repeating pattern of internucleotidic linkage stereochemistry, wherein the repeating pattern is a motif comprising at least 66% of internucleotidic linkage in the S conformation. In some embodiments, the core region of a wing-core-wing motif has repeating pattern of internucleotidic linkage stereochemistry, wherein the repeating pattern is a repeating triplet motif selected from RpRpSp and SpSpRp. In some embodiments, the core region of a wing-core-wing motif has repeating pattern of internucleotidic linkage stereochemistry, wherein the repeating pattern is a repeating RpRpSp. In some embodiments, the core region of a wing-core-wing motif has repeating pattern of internucleotidic linkage stereochemistry, wherein the repeating pattern is a repeating SpSpRp.

[0959] In some embodiments, the present disclosure provides a chirally controlled oligonucleotide composition of an oligonucleotide type whose pattern of backbone chiral centers in the core region comprises (Sp)mRp or Rp(Sp)m. In some embodiments, the present disclosure provides a chirally controlled oligonucleotide composition of an oligonucleotide type whose pattern of backbone chiral centers in the core region comprises Rp(Sp)m. In some embodiments, the present disclosure provides a chirally controlled oligonucleotide composition of an oligonucleotide type whose pattern of backbone chiral centers in the core region comprises (Sp)mRp. In some embodiments, m is 2. In some embodiments, the present disclosure provides a chirally controlled oligonucleotide composition of an oligonucleotide type whose pattern of backbone chiral centers in the core region comprises Rp(Sp)₂. In some embodiments, the present disclosure provides a chirally controlled oligonucleotide composition of an oligonucleotide type whose pattern of backbone chiral centers in the core region comprises (Sp)₂Rp(Sp)₂. In some embodiments, the present disclosure provides a chirally controlled oligonucleotide composition of an oligonucleotide type whose pattern of backbone chiral centers in the core region comprises (Rp)₂Rp(Sp)₂. In some embodiments, the present disclosure provides a chirally controlled oligonucleotide composition of an oligonucleotide type whose pattern of backbone chiral centers in the core region comprises RpSpRp(Sp)₂. In some embodiments, the present disclosure provides a chirally controlled oligonucleotide composition of an oligonucleotide type whose pattern of backbone chiral centers in the core region comprises SpRpRp(Sp)₂. In some embodiments, the present disclosure provides a chirally controlled oligonucleotide composition of an oligonucleotide type whose pattern of backbone chiral centers in the core region comprises (Sp)₂Rp.

[0960] In some embodiments, the present disclosure provides a chirally controlled oligonucleotide composition of an oligonucleotide type whose pattern of backbone chiral centers comprises (Sp)mRp or Rp(Sp)m. In some embodiments, the present disclosure provides a chirally controlled oligonucleotide composition of an oligonucleotide type whose pattern of backbone chiral centers comprises Rp(Sp)m. In some embodiments, the present disclosure provides a chirally controlled oligonucleotide composition of an oligonucleotide type whose pattern of backbone chiral centers comprises (Sp)mRp. In some embodiments, m is 2. In some embodiments, the present disclosure provides a chirally controlled oligonucleotide composition of an oligonucleotide type whose pattern of backbone chiral centers comprises Rp(Sp)₂. In some embodiments, the present disclosure provides a chirally controlled oligonucleotide composition of an oligonucleotide type whose pattern of backbone chiral centers comprises (Sp)₂Rp(Sp)₂. In some embodiments, the present disclosure provides a chirally controlled oligonucleotide composition of an oligonucleotide type whose pattern of backbone chiral centers comprises (Rp)₂Rp(Sp)₂. In some embodiments, the present disclosure provides a chirally controlled oligonucleotide composition of an oligonucleotide type whose pattern of backbone chiral centers comprises RpSpRp(Sp)₂. In some embodiments, the present disclosure provides a chirally controlled oligonucleotide composition of an oligonucleotide type whose pattern of backbone chiral centers comprises SpRpRp(Sp)₂. In some embodiments, the present disclosure provides a chirally controlled oligonucleotide composition of an oligonucleotide type whose pattern of backbone chiral centers comprises (Sp)₂Rp.

[0961] As defined herein, m is 1-50. In some embodiments, m is 1. In some embodiments, m is 2-50. In some embodiments, m is 2, 3, 4, 5, 6, 7 or 8. In some embodiments, m is 3, 4, 5, 6, 7 or 8. In some embodiments, m is 4, 5, 6, 7 or 8. In some embodiments, m is 5, 6, 7 or 8. In some embodiments, m is 6, 7 or 8. In some embodiments, m is 7 or 8. In some embodiments, m is 2. In some embodiments, m is 3. In some embodiments, m is 4. In some embodiments, m is 5. In some embodiments, m is 6. In some embodiments, m is 7. In some embodiments, m is 8. In some embodiments, m is 9. In some embodiments, m is 10. In some embodiments, m is 11. In some embodiments, m is 12. In some embodiments, m is 13. In some embodiments, m is 14. In some embodiments, m is 15. In some embodiments, m is 16. In some embodiments, m is 17. In some embodiments, m is 18. In some embodiments, m is 19. In some embodiments, m is 20. In some embodiments, m is 21. In some embodiments, m is 22. In some embodiments, m is 23. In some embodiments, m is 24. In some embodiments, m is 25. In some embodiments, m is greater than 25.

[0962] In some embodiments, a repeating pattern is (Sp)m(Rp)n, wherein n is 1-10, and m is independently as defined above and described herein. In some embodiments, the present disclosure provides a chirally controlled oligonucleotide composition of an oligonucleotide type whose pattern of backbone chiral centers comprises (Sp)m(Rp)n. In some embodiments, the present disclosure provides a chirally controlled oligonucleotide composition of an oligonucleotide type whose pattern of backbone chiral centers in the core region comprises (Sp)m(Rp)n. In some embodiments, a repeating pattern is (Rp)n(Sp)m, wherein n is 1-10, and m is independently as defined above and described herein. In some embodiments, the present disclosure provides a chirally controlled oligonucleotide composition of an oligonucleotide type whose pattern of backbone chiral centers comprises (Rp)n(Sp)m. In some embodiments, the present disclosure provides a chirally controlled oligonucleotide composition of an oligonucleotide type whose pattern of backbone chiral centers in the core region comprises (Rp)n(Sp)m. In some embodiments, (Rp)n(Sp)m is (Rp)(Sp)₂. In some embodiments, (Sp)n(Rp)m is (Sp)₂(Rp).

[0963] In some embodiments, the present disclosure provides a chirally controlled oligonucleotide composition of an oligonucleotide type whose pattern of backbone chiral centers comprises (Sp)m(Rp)n(Sp)t. In some embodiments, a repeating pattern is (Sp)m(Rp)n(Sp)t, wherein n is 1-10, t is 1-50, and m is as defined above and described herein. In some embodiments, the present disclosure provides a chirally controlled oligonucleotide composition of an oligonucleotide type whose pattern of backbone chiral centers in the core region comprises (Sp)m(Rp)n(Sp)t. In some embodiments, a repeating pattern is (Sp)t(Rp)n(Sp)m, wherein n is 1-10, t is 1-50, and m is as defined above and described herein. In some embodiments, the present disclosure provides a chirally controlled oligonucleotide composition of an oligonucleotide type whose pattern of backbone chiral centers comprises (Sp)t(Rp)n(Sp)m. In some embodiments, the present disclosure provides a chirally controlled oligonucleotide composition of an oligonucleotide type whose pattern of backbone chiral centers in the core region comprises (Sp)t(Rp)n(Sp)m.

[0964] In some embodiments, a repeating pattern is (Np)t(Rp)n(Sp)m, wherein n is 1-10, t is 1-50, Np is independently Rp or Sp, and m is as defined above and described herein. In some embodiments, the present disclosure provides a chirally controlled oligonucleotide composition of an oligonucleotide type whose pattern of backbone chiral centers comprises (Np)t(Rp)n(Sp)m. In some embodiments, the present disclosure provides a chirally controlled oligonucleotide composition of an oligonucleotide type whose pattern of backbone chiral centers in the core region comprises (Np)t(Rp)n(Sp)m. In some embodiments, a repeating pattern is (Np)m(Rp)n(Sp)t, wherein n is 1-10, t is 1-50, Np is independently Rp or Sp, and m is as defined above and described herein. In some embodiments, the present disclosure provides a chirally controlled oligonucleotide composition of an oligonucleotide type whose pattern of backbone chiral centers comprises (Np)m(Rp)n(Sp)t. In some embodiments, the present disclosure provides a chirally controlled oligonucleotide composition of an oligonucleotide type whose pattern of backbone chiral centers in the core region comprises (Np)m(Rp)n(Sp)t. In some embodiments, Np is Rp. In some embodiments, Np is Sp. In some embodiments, all Np are the same. In some embodiments, all Np are Sp. In some embodiments, at least one Np is different from the other Np. In some embodiments, t is 2.

[0965] As defined herein, n is 1-10. In some embodiments, n is 1, 2, 3, 4, 5, 6, 7 or 8. In some embodiments, n is 1. In some embodiments, n is 2, 3, 4, 5, 6, 7 or 8. In some embodiments, n is 3, 4, 5, 6, 7 or 8. In some embodiments, n is 4, 5, 6, 7 or 8. In some embodiments, n is 5, 6, 7 or 8. In some embodiments, n is 6, 7 or 8. In some embodiments, n is 7 or 8. In some embodiments, n is 1. In some embodiments, n is 2. In some embodiments, n is 3. In some embodiments, n is 4. In some embodiments, n is 5. In some embodiments, n is 6. In some embodiments, n is 7. In some embodiments, n is 8. In some embodiments, n is 9. In some embodiments, n is 10.

[0966] As defined herein, t is 1-50. In some embodiments, t is 1. In some embodiments, t is 2-50. In some embodiments, t is 2, 3, 4, 5, 6, 7 or 8. In some embodiments, t is 3, 4, 5, 6, 7 or 8. In some embodiments, t is 4, 5, 6, 7 or 8. In some embodiments, t is 5, 6, 7 or 8. In some embodiments, t is 6, 7 or 8. In some embodiments, t is 7 or 8. In some embodiments, t is 2. In some embodiments, t is 3. In some embodiments, t is 4. In some embodiments, t is 5. In some embodiments, t is 6. In some embodiments, t is 7. In some embodiments, t is 8. In some embodiments, t is 9. In some embodiments, t is 10. In some embodiments, t is 11. In some embodiments, t is 12. In some embodiments, t is 13. In some embodiments, t is 14. In some embodiments, t is 15. In some embodiments, t is 16. In some embodiments, t is 17. In some embodiments, t is 18. In some embodiments, t is 19. In some embodiments, t is 20. In some embodiments, t is 21. In some embodiments, t is 22. In some embodiments, t is 23. In some embodiments, t is 24. In some embodiments, t is 25. In some embodiments, t is greater than 25.

[0967] In some embodiments, at least one of m and t is greater than 2. In some embodiments, at least one of m and t is greater than 3. In some embodiments, at least one of m and t is greater than 4. In some embodiments, at least one of m and t is greater than 5. In some embodiments, at least one of m and t is greater than 6. In some embodiments, at least one of m and t is greater than 7. In some embodiments, at least one of m and t is greater than 8. In some embodiments, at least one of m and t is greater than 9. In some embodiments, at least one of m and t is greater than 10. In some embodiments, at least one of m and t is greater than 11. In some embodiments, at least one of m and t is greater than 12. In some embodiments, at least one of m and t is greater than 13. In some embodiments, at least one of m and t is greater than 14. In some embodiments, at least one of m and t is greater than 15. In some embodiments, at least one of m and t is greater than 16. In some embodiments, at least one of m and t is greater than 17. In some embodiments, at least one of m and t is greater than 18. In some embodiments, at least one of m and t is greater than 19. In some embodiments, at least one of m and t is greater than 20. In some embodiments, at least one of m and t is greater than 21. In some embodiments, at least one of m and t is greater than 22. In some embodiments, at least one of m and t is greater than 23. In some embodiments, at least one of m and t is greater than 24. In some embodiments, at least one of m and t is greater than 25.

[0968] In some embodiments, each one of m and t is greater than 2. In some embodiments, each one of m and t is greater than 3. In some embodiments, each one of m and t is greater than 4. In some embodiments, each one of m and t is greater than 5. In some embodiments, each one of m and t is greater than 6. In some embodiments, each one of m and t is greater than 7. In some embodiments, each one of m and t is greater than 8. In some embodiments, each one of m and t is greater than 9. In some embodiments, each one of m and t is greater than 10. In some embodiments, each one of m and t is greater than 11. In some embodiments, each one of m and t is greater than 12. In some embodiments, each one of m and t is greater than 13. In some embodiments, each one of m and t is greater than 14. In some embodiments, each one of m and t is greater than 15. In some embodiments, each one of m and t is greater than 16. In some embodiments, each one of m and t is greater than 17. In some embodiments, each one of m and t is greater than 18. In some embodiments, each one of m and t is greater than 19. In some embodiments, each one of m and t is greater than 20.

[0969] In some embodiments, the sum of m and t is greater than 3. In some embodiments, the sum of m and t is greater than 4. In some embodiments, the sum of m and t is greater than 5. In some embodiments, the sum of m and t is greater than 6. In some embodiments, the sum of m and t is greater than 7. In some embodiments, the sum of m and t is greater than 8. In some embodiments, the sum of m and t is greater than 9. In some embodiments, the sum of m and t is greater than 10. In some embodiments, the sum of m and t is greater than 11. In some embodiments, the sum of m and t is greater than 12. In some embodiments, the sum of m and t is greater than 13. In some embodiments, the sum of m and t is greater than 14. In some embodiments, the sum of m and t is greater than 15. In some embodiments, the sum of m and t is greater than 16. In some embodiments, the sum of m and t is greater than 17. In some embodiments, the sum of m and t is greater than 18. In some embodiments, the sum of m and t is greater than 19. In some embodiments, the sum of m and t is greater than 20. In some embodiments, the sum of m and t is greater than 21. In some embodiments, the sum of m and t is greater than 22. In some embodiments, the sum of m and t is greater than 23. In some embodiments, the sum of m and t is greater than 24. In some embodiments, the sum of m and t is greater than 25.

[0970] In some embodiments, n is 1, and at least one of m and t is greater than 1. In some embodiments, n is 1 and each of m and t is independently greater than 1. In some embodiments, m>n and t>n. In some embodiments, (Sp)m(Rp)n(Sp)t is (Sp)₂Rp(Sp)₂. In some embodiments, (Sp)t(Rp)n(Sp)m is (Sp)₂Rp(Sp)₂. In some embodiments, (Sp)t(Rp)n(Sp)m is SpRp(Sp)₂. In some embodiments, (Np)t(Rp)n(Sp)m is (Np)tRp(Sp)m. In some embodiments, (Np)t(Rp)n(Sp)m is (Np)₂Rp(Sp)m. In some embodiments, (Np)t(Rp)n(Sp)m is (Rp)₂Rp(Sp)m. In some embodiments, (Np)t(Rp)n(Sp)m is (Sp)₂Rp(Sp)m. In some embodiments, (Np)t(Rp)n(Sp)m is RpSpRp(Sp)m. In some embodiments, (Np)t(Rp)n(Sp)m is SpRpRp(Sp)m.

[0971] In some embodiments, (Sp)t(Rp)n(Sp)m is SpRpSpSp. In some embodiments, (Sp)t(Rp)n(Sp)m is (Sp)₂Rp(Sp)₂. In some embodiments, (Sp)t(Rp)n(Sp)m is (Sp)₃Rp(Sp)₃. In some embodiments, (Sp)t(Rp)n(Sp)m is (Sp)₄Rp(Sp)₄. In some embodiments, (Sp)t(Rp)n(Sp)m is (Sp)tRp(Sp)₅. In some embodiments, (Sp)t(Rp)n(Sp)m is SpRp(Sp)₅. In some embodiments, (Sp)t(Rp)n(Sp)m is (Sp)₂Rp(Sp)₅. In some embodiments, (Sp)t(Rp)n(Sp)m is (Sp)₃Rp(Sp)₅. In some embodiments, (Sp)t(Rp)n(Sp)m is (Sp)₄Rp(Sp)₅. In some embodiments, (Sp)t(Rp)n(Sp)m is (Sp)sRp(Sp)₅.

[0972] In some embodiments, (Sp)m(Rp)n(Sp)t is (Sp)₂Rp(Sp)₂. In some embodiments, (Sp)m(Rp)n(Sp)t is (Sp)₃Rp(Sp)₃. In some embodiments, (Sp)m(Rp)n(Sp)t is (Sp)₄Rp(Sp)₄. In some embodiments, (Sp)m(Rp)n(Sp)t is (Sp)mRp(Sp)₅. In some embodiments, (Sp)m(Rp)n(Sp)t is (Sp)₂Rp(Sp)₅. In some embodiments, (Sp)m(Rp)n(Sp)t is (Sp)₃Rp(Sp)₅. In some embodiments, (Sp)m(Rp)n(Sp)t is (Sp)₄Rp(Sp)₅. In some embodiments, (Sp)m(Rp)n(Sp)t is (Sp)sRp(Sp)₅.

[0973] In some embodiments, a core region comprises at least one Rp internucleotidic linkage. In some embodiments, a core region of a wing-core-wing motif comprises at least one Rp internucleotidic linkage. In some embodiments, a core region comprises at least one Rp phosphorothioate internucleotidic linkage. In some embodiments, a core region of a wing-core-wing motif comprises at least one Rp phosphorothioate internucleotidic linkage. In some embodiments, a core region of a wing-core-wing motif comprises only one Rp phosphorothioate internucleotidic linkage. In some embodiments, a core region motif comprises at least two Rp internucleotidic linkages. In some embodiments, a core region of a wing-core-wing motif comprises at least two Rp internucleotidic linkages. In some embodiments, a core region of a wing-core-wing motif comprises at least two Rp phosphorothioate internucleotidic linkages. In some embodiments, a core region comprises at least three Rp internucleotidic linkages. In some embodiments, a core region of a wing-core-wing motif comprises at least three Rp internucleotidic linkages. In some embodiments, a core region comprises at least three Rp phosphorothioate internucleotidic linkages. In some embodiments, a core region of a wing-core-wing motif comprises at least three Rp phosphorothioate internucleotidic linkages. In some embodiments, a core region comprises at least 4, 5, 6, 7, 8, 9, or 10 Rp internucleotidic linkages. In some embodiments, a core region of a wing-core-wing motif comprises at least 4, 5, 6, 7, 8, 9, or 10 Rp internucleotidic linkages. In some embodiments, a core region comprises at least 4, 5, 6, 7, 8, 9, or 10 Rp phosphorothioate internucleotidic linkages. In some embodiments, a core region of a wing-core-wing motif comprises at least 4, 5, 6, 7, 8, 9, or 10 Rp phosphorothioate internucleotidic linkages.

[0974] In some embodiments, a wing region comprises 2′-modifications of sugar moieties that differ from a core region. In some embodiments, a wing region comprises the same type of 2′-modifications that differ from a core region. In some embodiments, a wing region comprises 2′-F which is absent from a core region. In some embodiments, a wing region comprises a pattern of 2′-F which is absent from a core region. In some embodiments, a wing region comprises a level of 2′-F which differs from a core region. In some embodiments, a level is absolute as measured by the number of 2′-F modifications. In some embodiments, a level is relative as measured by the percentage of 2′-F modifications. In some embodiments, a wing region differs from a core region in that it contains less of a 2′-modification presented in a core region, as measured by the number and/or percentage of such 2′-modifications. In some embodiments, a wing region contains less of a 2′-OR¹ modification in a core region. In some embodiments, a wing region contains less of a 2′-OMe modification in a core region. In some embodiments, a wing region differs from a core region in that it contains less of unmodified sugar moieties presented in a core region, as measured by the number and/or percentage of such 2′-modifications.

[0975] In some embodiments, provided oligonucleotides comprise two or more wing regions and a core region, for example, provided oligonucleotides may comprise a wing-core-wing structure. In some embodiments, each wing region comprises 2′-modifications of sugar moieties that differ from a core region. In some embodiments, each wing region comprises the same type of 2′-modifications that differ from a core region. In some embodiments, each wing region comprises 2′-F which is absent from a core region. In some embodiments, each wing region comprises a pattern of 2′-F which is absent from a core region. In some embodiments, each wing region comprises a level of 2′-F which differs from a core region. In some embodiments, a level is absolute as measured by the number of 2′-F modifications. In some embodiments, a level is relative as measured by the percentage of 2′-F modifications. In some embodiments, each wing region differs from a core region in that it contains less of a 2′-modification presented in a core region, as measured by the number and/or percentage of such 2′-modifications. In some embodiments, each wing region contains less of a 2′-OR¹ modification in a core region. In some embodiments, each wing region contains less of a 2′—OMe modification in a core region. In some embodiments, each wing region differs from a core region in that it contains less of unmodified sugar moieties presented in a core region, as measured by the number and/or percentage of such 2′-modifications.

[0976] In certain embodiments, a wing-core-wing motif is a 5-10-5 motif wherein the residues at each wing region are 2′-modified residues. In certain embodiments, a wing-core-wing motif is a 5-10-5 motif wherein the residues at each wing region are 2′-OR-modified residues. In certain embodiments, a wing-core-wing motif is a 5-10-5 motif wherein the residues at each wing region are 2′-MOE-modified residues. In certain embodiments, a wing-core-wing motif is a 5-10-5 motif wherein the residues at each wing region are 2′-OMe-modified residues. In certain embodiments, a wing-core-wing motif is a 5-10-5 motif wherein the residues at each wing region are 2′-F-modified residues. In certain embodiments, a wing-core-wing motif is a 5-10-5 motif wherein the residues in the core region are 2′-deoxyribonucleoside residues. In certain embodiments, a wing-core-wing motif is a 5-10-5 motif, wherein all internucleotidic linkages are phosphorothioate linkages. In certain embodiments, a wing-core-wing motif is a 5-10-5 motif, wherein all internucleotidic linkages are chiral phosphorothioate linkages. In certain embodiments, a wing-core-wing motif is a 5-10-5 motif wherein the residues at each wing region are 2′-modified residues, the residues in the core region are 2′-deoxyribonucleoside residues, and all internucleotidic linkages in the core region are chiral phosphorothioate linkages. In certain embodiments, a wing-core-wing motif is a 5-10-5 motif wherein the residues at each wing region are 2′-OR-modified residues, the residues in the core region are 2′-deoxyribonucleoside residues, and all internucleotidic linkages in the core region are chiral phosphorothioate linkages. In certain embodiments, a wing-core-wing motif is a 5-10-5 motif wherein the residues at each wing region are 2′-MOE-modified residues, the residues in the core region are 2′-deoxyribonucleoside residues, and all internucleotidic linkages in the core region are chiral phosphorothioate linkages. In certain embodiments, a wing-core-wing motif is a 5-10-5 motif wherein the residues at each wing region are 2′-OMe-modified residues, the residues in the core region are 2′-deoxyribonucleoside residues, and all internucleotidic linkages in the core region are chiral phosphorothioate linkages.

[0977] In some embodiments, residues at the “X” wing region are not 2′-MOE-modified residues. In certain embodiments, a wing-core motif is a motif wherein the residues at the “X” wing region are not 2′-MOE-modified residues. In certain embodiments, a core-wing motif is a motif wherein the residues at the “X” wing region are not 2′-MOE-modified residues. In certain embodiments, a wing-core-wing motif is a motif wherein the residues at each “X” wing region are not 2′-MOE-modified residues. In certain embodiments, a wing-core-wing motif is a 5-10-5 motif wherein the residues at each “X” wing region are not 2′-MOE-modified residues. In certain embodiments, a wing-core-wing motif is a 5-10-5 motif wherein the residues in the core “Y” region are 2′-deoxyribonucleoside residues. In certain embodiments, a wing-core-wing motif is a 5-10-5 motif, wherein all internucleotidic linkages are phosphorothioate internucleotidic linkages. In certain embodiments, a wing-core-wing motif is a 5-10-5 motif, wherein all internucleotidic linkages are chiral phosphorothioate internucleotidic linkages. In certain embodiments, a wing-core-wing motif is a 5-10-5 motif wherein the residues at each “X” wing region are not 2′-MOE-modified residues, the residues in the core “Y” region are 2′-deoxyribonucleoside, and all internucleotidic linkages are chiral phosphorothioate internucleotidic linkages.

[0978] In some embodiments, a chiral, modified phosphate linkage is a chiral phosphorothioate linkage, i.e., phosphorothioate internucleotidic linkage. In some embodiments, a core region comprises at least 5%, 10%, 15%, 20%, 25%, 30%, 35%, 40%, 45%, 50%, 55%, 60%, 65%, 70%, 75%, 80%, 85%, 90%, 95%, or 100% chiral phosphorothioate internucleotidic linkages. In some embodiments, all chiral, modified phosphate linkages are chiral phosphorothioate internucleotidic linkages. In some embodiments, at least about 10%, 20%, 30%, 40%, 50%, 60%, 70%, 80%, or 90% chiral phosphorothioate internucleotidic linkages of a core region are of the Sp conformation. In some embodiments, at least about 10% chiral phosphorothioate internucleotidic linkages of a core region are of the Sp conformation. In some embodiments, at least about 20% chiral phosphorothioate internucleotidic linkages of a core region are of the Sp conformation. In some embodiments, at least about 30% chiral phosphorothioate internucleotidic linkages of a core region are of the Sp conformation. In some embodiments, at least about 40% chiral phosphorothioate internucleotidic linkages of a core region are of the Sp conformation. In some embodiments, at least about 50% chiral phosphorothioate internucleotidic linkages of a core region are of the Sp conformation. In some embodiments, at least about 60% chiral phosphorothioate internucleotidic linkages of a core region are of the Sp conformation. In some embodiments, at least about 70% chiral phosphorothioate internucleotidic linkages of a core region are of the Sp conformation. In some embodiments, at least about 80% chiral phosphorothioate internucleotidic linkages of a core region are of the Sp conformation. In some embodiments, at least about 90% chiral phosphorothioate internucleotidic linkages of a core region are of the Sp conformation. In some embodiments, at least about 95% chiral phosphorothioate internucleotidic linkages of a core region are of the Sp conformation.

[0979] In some embodiments, at least about 10%, 20%, 30%, 40%, 50%, 60%, 70%, 80%, or 90% chiral phosphorothioate internucleotidic linkages of a core region are of the Rp conformation. In some embodiments, at least about 10% chiral phosphorothioate internucleotidic linkages of a core region are of the Rp conformation. In some embodiments, at least about 20% chiral phosphorothioate internucleotidic linkages of a core region are of the Rp conformation. In some embodiments, at least about 30% chiral phosphorothioate internucleotidic linkages of a core region are of the Rp conformation. In some embodiments, at least about 40% chiral phosphorothioate internucleotidic linkages of a core region are of the Rp conformation. In some embodiments, at least about 50% chiral phosphorothioate internucleotidic linkages of a core region are of the Rp conformation. In some embodiments, at least about 60% chiral phosphorothioate internucleotidic linkages of a core region are of the Rp conformation. In some embodiments, at least about 70% chiral phosphorothioate internucleotidic linkages of a core region are of the Rp conformation. In some embodiments, at least about 80% chiral phosphorothioate internucleotidic linkages of a core region are of the Rp conformation. In some embodiments, at least about 90% chiral phosphorothioate internucleotidic linkages of a core region are of the Rp conformation. In some embodiments, at least about 95% chiral phosphorothioate internucleotidic linkages of a core region are of the Rp conformation.

[0980] In some embodiments, less than about 10%, 20%, 30%, 40%, 50%, 60%, 70%, 80%, or 90% chiral phosphorothioate internucleotidic linkages of a core region are of the Rp conformation. In some embodiments, less than about 10% chiral phosphorothioate internucleotidic linkages of a core region are of the Rp conformation. In some embodiments, less than about 20% chiral phosphorothioate internucleotidic linkages of a core region are of the Rp conformation. In some embodiments, less than about 30% chiral phosphorothioate internucleotidic linkages of a core region are of the Rp conformation. In some embodiments, less than about 40% chiral phosphorothioate internucleotidic linkages of a core region are of the Rp conformation. In some embodiments, less than about 50% chiral phosphorothioate internucleotidic linkages of a core region are of the Rp conformation. In some embodiments, less than about 60% chiral phosphorothioate internucleotidic linkages of a core region are of the Rp conformation. In some embodiments, less than about 70% chiral phosphorothioate internucleotidic linkages of a core region are of the Rp conformation. In some embodiments, less than about 80% chiral phosphorothioate internucleotidic linkages of a core region are of the Rp conformation. In some embodiments, less than about 90% chiral phosphorothioate internucleotidic linkages of a core region are of the Rp conformation. In some embodiments, less than about 95% chiral phosphorothioate internucleotidic linkages of a core region are of the Rp conformation. In some embodiments, a core region has only one Rp chiral phosphorothioate internucleotidic linkages. In some embodiments, a core region has only one Rp chiral phosphorothioate internucleotidic linkages, wherein all internucleotide linkages are chiral phosphorothioate internucleotidic linkages.

[0981] In some embodiments, provided oligonucleotides are blockmers. In some embodiments, provided oligonucleotide are altmers. In some embodiments, provided oligonucleotides are altmers comprising alternating blocks. In some embodiments, a blockmer or an altmer can be defined by chemical modifications (including presence or absence), e.g., base modifications, sugar modification, internucleotidic linkage modifications, stereochemistry, etc. Example chemical modifications, stereochemistry and patterns thereof for a block and/or an alternating unit include but are not limited to those described in this disclosure, such as those described for a wing, a core, an oligonucleotide, etc. In some embodiments, a blockmer comprises a pattern of . . . SS . . . RR . . . SS . . . RR . . . . In some embodiments, an altmer comprises a pattern of SRSRSRSR.

[0982] In some embodiments, a pattern of backbone chiral center, e.g., of a wing, a core, a block, comprises one or more (Rp)p(Sp)x(Rp)q(Sp)y, wherein each of p, x, q, y is independently 0-50, p+q>0, and x+y>0.

[0983] In some embodiments, a provided pattern of backbone chiral centers comprises repeating (Sp)m(Rp)n, (Rp)n(Sp)m, (Np)t(Rp)n(Sp)m, or (Sp)t(Rp)n(Sp)m units. In some embodiments, a repeating unit is (Sp)m(Rp)n. In some embodiments, a repeating unit is SpRp. In some embodiments, a repeating unit is SpSpRp. In some embodiments, a repeating unit is SpRpRp. In some embodiments, a repeating unit is RpRpSp. In some embodiments, a repeating unit is (Rp)n(Sp)m. In some embodiments, a repeating unit is (Np)t(Rp)n(Sp)m. In some embodiments, a repeating unit is (Sp)t(Rp)n(Sp)m.

[0984] In some embodiments, a provided pattern of backbone chiral centers comprises (Rp/Sp)x-(All Rp or All Sp)-(Rp/Sp)y. In some embodiments, a provided pattern of backbone chiral centers comprises (Rp/Sp)-(All Rp or All Sp)-(Rp/Sp). In some embodiments, a provided pattern of backbone chiral centers comprises (Rp)x-(All Sp)-(Rp)y. In some embodiments, a provided pattern of backbone chiral centers comprises (Rp)-(All Sp)-(Rp). In some embodiments, a provided pattern of backbone chiral centers comprises (Sp)x-(All Rp)-(Sp)y. In some embodiments, a provided pattern of backbone chiral centers comprises (Sp)-(All Rp)-(Sp). In some embodiments, a provided pattern of backbone chiral centers comprises (Rp/Sp)x-(repeating (Sp)m(Rp)n)-(Rp/Sp)y. In some embodiments, a provided pattern of backbone chiral centers comprises (Rp/Sp)-(repeating (Sp)m(Rp)n)-(Rp/Sp). In some embodiments, a provided pattern of backbone chiral centers comprises (Rp/Sp)x-(repeating SpSpRp)-(Rp/Sp)y. In some embodiments, a provided pattern of backbone chiral centers comprises (Rp/Sp)-(repeating SpSpRp)-(Rp/Sp).

[0985] In some embodiments, a provided pattern of backbone chiral centers is (Rp/Sp)x-(All Rp or All Sp)-(Rp/Sp)y. In some embodiments, a provided pattern of backbone chiral centers is (Rp/Sp)-(All Rp or All Sp)-(Rp/Sp). In some embodiments, a provided pattern of backbone chiral centers is (Rp)x-(All Sp)-(Rp)y. In some embodiments, a provided pattern of backbone chiral centers is (Rp)-(All Sp)-(Rp). In some embodiments, a provided pattern of backbone chiral centers is (Sp)x-(All Rp)-(Sp)y. In some embodiments, a provided pattern of backbone chiral centers is (Sp)-(All Rp)-(Sp). In some embodiments, a provided pattern of backbone chiral centers is (Rp/Sp)x-(repeating (Sp)m(Rp)n)-(Rp/Sp)y. In some embodiments, a provided pattern of backbone chiral centers is (Rp/Sp)-(repeating (Sp)m(Rp)n)-(Rp/Sp). In some embodiments, a provided pattern of backbone chiral centers is (Rp/Sp)x-(repeating SpSpRp)-(Rp/Sp)y. In some embodiments, a provided pattern of backbone chiral centers is (Rp/Sp)-(repeating SpSpRp)-(Rp/Sp).

[0986] A person of ordinary skill in the art understands that various regions of a target transcript can be targeted by provided compositions and methods. In some embodiments, a base sequence of provided oligonucleotides comprises an intron sequence. In some embodiments, a base sequence of provided oligonucleotides comprises an exon sequence. In some embodiments, a base sequence of provided oligonucleotides comprises an intron and an exon sequence. In some embodiments, a base sequence of provided oligonucleotides comprises a sequence spanning a splicing site. In some embodiments, a base sequence of provided oligonucleotides comprises a sequence found in or comprising a 5′ splice site, a branch point sequence (BPS), a polypyrimidine tact (py tact), a 3′ splice site, an intronic splicing silencer (ISS), an exonic splicing silencer (ESS), an intronic splicing enhancer (ISE), and/or an exonic splicing enhancer. In some embodiments, a base sequence of provided oligonucleotides is an intron sequence. In some embodiments, a base sequence of provided oligonucleotides is an exon sequence. In some embodiments, a base sequence of provided oligonucleotides is a sequence spanning a splicing site. In some embodiments, a base sequence of provided oligonucleotides is a sequence found in or comprising a 5′ splice site, a branch point sequence (BPS), a polypyrimidine tact (py tact), a 3′ splice site, an intronic splicing silencer (ISS), an exonic splicing silencer (ESS), an intronic splicing enhancer (ISE), and/or an exonic splicing enhancer. In some embodiments, a base sequence of provided oligonucleotides is a sequence found in a branch point sequence (BPS), a polypyrimidine tact (py tact), an intronic splicing silencer (ISS), an exonic splicing silencer (ESS), an intronic splicing enhancer (ISE), and/or an exonic splicing enhancer.

[0987] As understood by a person having ordinary skill in the art, provided oligonucleotides and compositions, among other things, can target a great number of nucleic acid polymers. For instance, in some embodiments, provided oligonucleotides and compositions may target a transcript of a nucleic acid sequence, wherein a common base sequence of oligonucleotides (e.g., a base sequence of an oligonucleotide type) comprises or is a sequence complementary to a sequence of the transcript. In some embodiments, a common base sequence comprises a sequence complimentary to a sequence of a target. In some embodiments, a common base sequence is a sequence complimentary to a sequence of a target. In some embodiments, a common base sequence comprises or is a sequence 100% complimentary to a sequence of a target. In some embodiments, a common base sequence comprises a sequence 100% complimentary to a sequence of a target. In some embodiments, a common base sequence is a sequence 100% complimentary to a sequence of a target. In some embodiments, a common base sequence in a core comprises or is a sequence complimentary to a sequence of a target. In some embodiments, a common base sequence in a core comprises a sequence complimentary to a sequence of a target. In some embodiments, a common base sequence in a core is a sequence % complimentary to a sequence of a target. In some embodiments, a common base sequence in a core comprises or is a sequence 100% complimentary to a sequence of a target. In some embodiments, a common base sequence in a core comprises a sequence 100% complimentary to a sequence of a target. In some embodiments, a common base sequence in a core is a sequence 100% complimentary to a sequence of a target.

[0988] In some embodiments, as described in this disclosure, provided oligonucleotides and compositions may provide new cleavage patterns, higher cleavage rate, higher cleavage degree, higher cleavage selectivity, etc. In some embodiments, provided compositions can selectively suppress (e.g., cleave) a transcript from a target nucleic acid sequence which has one or more similar sequences exist within a subject or a population, each of the target and its similar sequences contains a specific nucleotidic characteristic sequence element that defines the target sequence relative to the similar sequences. In some embodiments, for example, a target sequence is a wild-type allele or copy of a gene, and a similar sequence is a sequence has very similar base sequence, e.g., a sequence having SNP, mutations, etc.

[0989] In some embodiments, a similar sequence has greater than 60%, 65%, 70%, 75%, 80%, 85%, 90%, 91%, 92%, 93%, 94%, 95%, 96%, 97%, 98% or 99% sequence homology with a target sequence. In some embodiments, a target sequence is a disease-causing copy of a nucleic acid sequence comprising one or more mutations and/or SNPs, and a similar sequence is a copy not causing the disease (wild type). In some embodiments, a target sequence comprises a mutation, wherein a similar sequence is the corresponding wild-type sequence. In some embodiments, a target sequence is a mutant allele, while a similar sequence is a wild-type allele. In some embodiments, a target sequence comprises an SNP that is associated with a disease-causing allele, while a similar sequence comprises the same SNP that is not associates with the disease-causing allele. In some embodiments, the region of a target sequence that is complementary to a common base sequence of a provided oligonucleotide composition has greater than 60%, 65%, 70%, 75%, 80%, 85%, 90%, 91%, 92%, 93%, 94%, 95%, 96%, 97%, 98% or 99% sequence homology with the corresponding region of a similar sequence. In some embodiments, the region of a target sequence that is complementary to a common base sequence of a provided oligonucleotide composition differs from the corresponding region of a similar sequence at less than 5, less than 4, less than 3, less than 2, or only 1 base pairs. In some embodiments, the region of a target sequence that is complementary to a common base sequence of a provided oligonucleotide composition differs from the corresponding region of a similar sequence only at a mutation site or SNP site. In some embodiments, the region of a target sequence that is complementary to a common base sequence of a provided oligonucleotide composition differs from the corresponding region of a similar sequence only at a mutation site. In some embodiments, the region of a target sequence that is complementary to a common base sequence of a provided oligonucleotide composition differs from the corresponding region of a similar sequence only at an SNP site.

[0990] In some embodiments, a common base sequence comprises or is a sequence complementary to a characteristic sequence element. In some embodiments, a common base sequence comprises a sequence complementary to a characteristic sequence element. In some embodiments, a common base sequence is a sequence complementary to a characteristic sequence element. In some embodiments, a common base sequence comprises or is a sequence 100% complementary to a characteristic sequence element. In some embodiments, a common base sequence comprises a sequence 100% complementary to a characteristic sequence element. In some embodiments, a common base sequence is a sequence 100% complementary to a characteristic sequence element. In some embodiments, a common base sequence in a core comprises or is a sequence complementary to a characteristic sequence element. In some embodiments, a common base sequence in a core comprises a sequence complementary to a characteristic sequence element. In some embodiments, a common base sequence in a core is a sequence complementary to a characteristic sequence element. In some embodiments, a common base sequence in a core comprises or is a sequence 100% complementary to a characteristic sequence element. In some embodiments, a common base sequence in a core comprises a sequence 100% complementary to a characteristic sequence element. In some embodiments, a common base sequence in a core is a sequence 100% complementary to a characteristic sequence element.

[0991] Among other things, the present disclosure recognizes that a base sequence may have impact on oligonucleotide properties. In some embodiments, a base sequence may have impact on cleavage pattern of a target when oligonucleotides having the base sequence are utilized for suppressing a target, e.g., through a pathway involving RNase H: for example, FIG. 33 demonstrates that structurally similar (all phosphorothioate linkages, all stereorandom) oligonucleotides have different sequences may have different cleavage patterns. In some embodiments, a common base sequence of a non-stereorandom oligonucleotide compositions (e.g., certain oligonucleotide compositions provided in the present disclosure) is a base sequence that when applied to a DNA oligonucleotide composition or a stereorandom all-phosphorothioate oligonucleotide composition, cleavage pattern of the DNA (DNA cleavage pattern) and/or the stereorandom all-phosphorothioate (stereorandom cleavage pattern) composition has a cleavage site within or in the vicinity of a characteristic sequence element. In some embodiments, a cleavage site within or in the vicinity is within a sequence complementary to a core region of a common sequence. In some embodiments, a cleavage site within or in the vicinity is within a sequence 100% complementary to a core region of a common sequence.

[0992] In some embodiments, a common base sequence is a base sequence that has a cleavage site within or in the vicinity of a characteristic sequence element in its DNA cleavage pattern. In some embodiments, a common base sequence is a base sequence that has a cleavage site within a characteristic sequence element in its DNA cleavage pattern. In some embodiments, a common base sequence is a base sequence that has a cleavage site in the vicinity of a characteristic sequence element in its DNA cleavage pattern. In some embodiments, a common base sequence is a base sequence that has a cleavage site in the vicinity of a mutation or SNP of a characteristic sequence element in its DNA cleavage pattern. In some embodiments, a common base sequence is a base sequence that has a cleavage site in the vicinity of a mutation in its DNA cleavage pattern. In some embodiments, a common base sequence is a base sequence that has a cleavage site in the vicinity of an SNP in its DNA cleavage pattern.

[0993] In some embodiments, a common base sequence is a base sequence that has a cleavage site within or in the vicinity of a characteristic sequence element in its stereorandom cleavage pattern. In some embodiments, a common base sequence is a base sequence that has a cleavage site within a characteristic sequence element in its stereorandom cleavage pattern. In some embodiments, a common base sequence is a base sequence that has a cleavage site in the vicinity of a characteristic sequence element in its stereorandom cleavage pattern. In some embodiments, a common base sequence is a base sequence that has a cleavage site in the vicinity of a mutation or SNP of a characteristic sequence element in its stereorandom cleavage pattern. In some embodiments, a common base sequence is a base sequence that has a cleavage site in the vicinity of a mutation in its stereorandom cleavage pattern. In some embodiments, a common base sequence is a base sequence that has a cleavage site in the vicinity of an SNP in its stereorandom cleavage pattern.

[0994] In some embodiments, a common base sequence comprises or is a sequence complementary to a nucleic acid sequence. In some embodiments, a common base sequence comprises or is a sequence 100% complementary to a nucleic acid sequence. In some embodiments, a common base sequence comprises or is a sequence complementary to a disease-causing nucleic acid sequence. In some embodiments, a common base sequence comprises or is a sequence 100% complementary to a disease-causing nucleic acid sequence. In some embodiments, a common base sequence comprises or is a sequence complementary to a characteristic sequence element of disease-causing nucleic acid sequence, which characteristic sequences differentiate a disease-causing nucleic acid sequence from a non-diseasing-causing nucleic acid sequence. In some embodiments, a common base sequence comprises or is a sequence 100% complementary to a characteristic sequence element of disease-causing nucleic acid sequence, which characteristic sequences differentiate a disease-causing nucleic acid sequence from a non-diseasing-causing nucleic acid sequence. In some embodiments, a common base sequence comprises or is a sequence complementary to a disease-associated nucleic acid sequence. In some embodiments, a common base sequence comprises or is a sequence 100% complementary to a disease-associated nucleic acid sequence. In some embodiments, a common base sequence comprises or is a sequence complementary to a characteristic sequence element of disease-associated nucleic acid sequence, which characteristic sequences differentiate a disease-associated nucleic acid sequence from a non-diseasing-associated nucleic acid sequence. In some embodiments, a common base sequence comprises or is a sequence 100% complementary to a characteristic sequence element of disease-associated nucleic acid sequence, which characteristic sequences differentiate a disease-associated nucleic acid sequence from a non-diseasing-associated nucleic acid sequence.

[0995] In some embodiments, a common base sequence comprises or is a sequence complementary to a gene. In some embodiments, a common base sequence comprises or is a sequence 100% complementary to a gene. In some embodiments, a common base sequence comprises or is a sequence complementary to a characteristic sequence element of a gene, which characteristic sequences differentiate the gene from a similar sequence sharing homology with the gene. In some embodiments, a common base sequence comprises or is a sequence 100% complementary to a characteristic sequence element of a gene, which characteristic sequences differentiate the gene from a similar sequence sharing homology with the gene. In some embodiments, a common base sequence comprises or is a sequence complementary to characteristic sequence element of a target gene, which characteristic sequences comprises a mutation that is not found in other copies of the gene, e.g., the wild-type copy of the gene, another mutant copy the gene, etc. In some embodiments, a common base sequence comprises or is a sequence 100% complementary to characteristic sequence element of a target gene, which characteristic sequences comprises a mutation that is not found in other copies of the gene, e.g., the wild-type copy of the gene, another mutant copy the gene, etc.

[0996] In some embodiments, a common base sequence comprises or is a sequence complementary to a sequence comprising an SNP. In some embodiments, a common base sequence comprises or is a sequence complementary to a sequence comprising an SNP, and the common base sequence is 100% complementary to the SNP that is associated with a disease.

[0997] In some embodiments, a chiral internucleotidic linkage in provided oligonucleotides has the structure of formula I. In some embodiments, a chiral internucleotidic linkage is phosphorothioate. In some embodiments, each chiral internucleotidic linkage in a single oligonucleotide of a provided composition independently has the structure of formula I. In some embodiments, each chiral internucleotidic linkage in a single oligonucleotide of a provided composition is a phosphorothioate.

[0998] In some embodiments, oligonucleotides of the present disclosure comprise one or more modified sugar moieties. In some embodiments, oligonucleotides of the present disclosure comprise one or more modified base moieties. As known by a person of ordinary skill in the art and described in the disclosure, various modifications can be introduced to a sugar and/or moiety. For example, in some embodiments, a modification is a modification described in U.S. Pat. No. 9,006,198, WO2014/012081 and WO/2015/107425, the sugar and base modifications of each of which are incorporated herein by reference.

[0999] In some embodiments, a sugar modification is a 2′-modification. Commonly used 2′-modifications include but are not limited to 2′-OR¹, wherein R¹ is not hydrogen. In some embodiments, a modification is 2′-OR, wherein R is optionally substituted aliphatic. In some embodiments, a modification is 2′-OMe. In some embodiments, a modification is 2′-O-MOE. In some embodiments, the present disclosure demonstrates that inclusion and/or location of particular chirally pure internucleotidic linkages can provide stability improvements comparable to or better than those achieved through use of modified backbone linkages, bases, and/or sugars. In some embodiments, a provided single oligonucleotide of a provided composition has no modifications on the sugars. In some embodiments, a provided single oligonucleotide of a provided composition has no modifications on 2′-positions of the sugars (i.e., the two groups at the 2′-position are either —H/—H or —H/—OH). In some embodiments, a provided single oligonucleotide of a provided composition does not have any 2′-MOE modifications.

[1000] In some embodiments, a 2′-modification is —O-L- or -L- which connects the 2′-carbon of a sugar moiety to another carbon of a sugar moiety. In some embodiments, a 2′-modification is —O-L- or -L- which connects the 2′-carbon of a sugar moiety to the 4′-carbon of a sugar moiety. In some embodiments, a 2′-modification is S-cEt. In some embodiments, a modified sugar moiety is an LNA moiety.

[1001] In some embodiments, a 2′-modification is —F. In some embodiments, a 2′-modification is FANA. In some embodiments, a 2′-modification is FRNA.

[1002] In some embodiments, a sugar modification is a 5′-modification, e.g., R-5′-Me, S-5′-Me, etc.

[1003] In some embodiments, a sugar modification changes the size of the sugar ring. In some embodiments, a sugar modification is the sugar moiety in FHNA.

[1004] In some embodiments, a sugar modification replaces a sugar moiety with another cyclic or acyclic moiety. Example such moieties are widely known in the art, including but not limited to those used in morpholio (optionally with its phosphorodiamidate linkage), glycol nucleic acids, etc.

[1005] In some embodiments, a provided oligonucleotide in a provided composition has at least about 25% of its internucleotidic linkages in Sp configuration. In some embodiments, a provided oligonucleotide in a provided composition has at least about 30% of its internucleotidic linkages in Sp configuration. In some embodiments, a provided oligonucleotide in a provided composition has at least about 35% of its internucleotidic linkages in Sp configuration. In some embodiments, a provided oligonucleotide in a provided composition has at least about 40% of its internucleotidic linkages in Sp configuration. In some embodiments, a provided oligonucleotide in a provided composition has at least about 45% of its internucleotidic linkages in Sp configuration. In some embodiments, a provided oligonucleotide in a provided composition has at least about 50% of its internucleotidic linkages in Sp configuration. In some embodiments, a provided oligonucleotide in a provided composition has at least about 55% of its internucleotidic linkages in Sp configuration. In some embodiments, a provided oligonucleotide in a provided composition has at least about 60% of its internucleotidic linkages in Sp configuration. In some embodiments, a provided oligonucleotide in a provided composition has at least about 65% of its internucleotidic linkages in Sp configuration. In some embodiments, a provided oligonucleotide in a provided composition has at least about 70% of its internucleotidic linkages in Sp configuration. In some embodiments, a provided oligonucleotide in a provided composition has at least about 75% of its internucleotidic linkages in Sp configuration. In some embodiments, a provided oligonucleotide in a provided composition has at least about 80% of its internucleotidic linkages in Sp configuration. In some embodiments, a provided oligonucleotide in a provided composition has at least about 85% of its internucleotidic linkages in Sp configuration. In some embodiments, a provided oligonucleotide in a provided composition has at least about 90% of its internucleotidic linkages in Sp configuration.

[1006] In some embodiments, the present disclosure provides chirally controlled oligonucleotide compositions which are of high crude purity and of high diastereomeric purity. In some embodiments, the present disclosure provides and chirally controlled oligonucleotide compositions which are of high crude purity. In some embodiments, the present disclosure provides chirally controlled oligonucleotide compositions which are of high diastereomeric purity.

[1007] In some embodiments, a chirally controlled oligonucleotide composition is a substantially pure preparation of an oligonucleotide type in that oligonucleotides in the composition that are not of the oligonucleotide type are impurities form the preparation process of said oligonucleotide type, in some case, after certain purification procedures.

[1008] In some embodiments, the present disclosure provides oligonucleotides comprising one or more diastereomerically pure internucleotidic linkages with respect to the chiral linkage phosphorus within the composition. In some embodiments, the present disclosure provides oligonucleotides comprising one or more diastereomerically pure internucleotidic linkages having the structure of formula I. In some embodiments, the present disclosure provides oligonucleotides comprising one or more diastereomerically pure internucleotidic linkages with respect to the chiral linkage phosphorus, and one or more phosphate diester linkages. In some embodiments, the present disclosure provides oligonucleotides comprising one or more diastereomerically pure internucleotidic linkages having the structure of formula I, and one or more phosphate diester linkages. In some embodiments, the present disclosure provides oligonucleotides comprising one or more diastereomerically pure internucleotidic linkages having the structure of formula I-c, and one or more phosphate diester linkages. In some embodiments, such oligonucleotides are prepared by using stereoselective oligonucleotide synthesis, as described in this application, to form pre-designed diastereomerically pure internucleotidic linkages with respect to the chiral linkage phosphorus.

[1009] In certain embodiments, a modified internucleotidic linkages has the structure of formula I:

[chemical structure]

wherein each variable is as defined and described below. In some embodiments, a linkage of formula I is chiral. In some embodiments, the present disclosure provides oligonucleotides comprising one or more modified internucleotidic linkages of formula I. In some embodiments, the present disclosure provides an oligonucleotide comprising one or more modified internucleotidic linkages of formula I, and wherein individual internucleotidic linkages of formula I within the oligonucleotide have different P-modifications relative to one another. In some embodiments, the present disclosure provides an oligonucleotide comprising one or more modified internucleotidic linkages of formula I, and wherein individual internucleotidic linkages of formula I within the oligonucleotide have different —X-L-R¹ relative to one another. In some embodiments, the present disclosure provides an oligonucleotide comprising one or more modified internucleotidic linkages of formula I, and wherein individual internucleotidic linkages of formula I within the oligonucleotide have different X relative to one another. In some embodiments, the present disclosure provides an oligonucleotide comprising one or more modified internucleotidic linkages of formula I, and wherein individual internucleotidic linkages of formula I within the oligonucleotide have different -L-R¹ relative to one another.

[1010] In some embodiments, a chirally controlled oligonucleotide is an oligonucleotide in a chirally controlled composition that is of the particular oligonucleotide type, and the chirally controlled oligonucleotide is of the type. In some embodiments, a chirally controlled oligonucleotide is an oligonucleotide in a provided composition that comprises a predetermined level of a plurality of oligonucleotides that share a common base sequence, a common pattern of backbone linkages, and a common pattern of backbone chiral centers, and the chirally controlled oligonucleotide shares the common base sequence, the common pattern of backbone linkages, and the common pattern of backbone chiral centers.

[1011] In some embodiments, the present disclosure provides a chirally controlled oligonucleotide, wherein at least two of the individual internucleotidic linkages within the oligonucleotide have different stereochemistry and/or different P-modifications relative to one another. In some embodiments, the present disclosure provides a chirally controlled oligonucleotide, wherein at least two of the individual internucleotidic linkages within the oligonucleotide have different stereochemistry relative to one another, and wherein at least a portion of the structure of the chirally controlled oligonucleotide is characterized by a repeating pattern of alternating stereochemistry.

[1012] In some embodiments, the present disclosure provides a chirally controlled oligonucleotide, wherein at least two of the individual internucleotidic linkages within the oligonucleotide have different P-modifications relative to one another, in that they have different X atoms in their —XLR¹ moieties, and/or in that they have different L groups in their —XLR¹ moieties, and/or that they have different R¹ atoms in their —XLR¹ moieties.

[1013] In some embodiments, the present disclosure provides a chirally controlled oligonucleotide, wherein at least two of the individual internucleotidic linkages within the oligonucleotide have different stereochemistry and/or different P-modifications relative to one another and the oligonucleotide has a structure represented by the following formula:

[S^{B}ₙ1R^{B}n2S^{B}n3R^{B}n4 . . . S^{B}nxR^{B}ny]

wherein:
each R^{B} independently represents a block of nucleotide units having the R configuration at the linkage phosphorus;
each S^{B} independently represents a block of nucleotide units having the S configuration at the linkage phosphorus;
each of n1-ny is zero or an integer, with the requirement that at least one odd n and at least one even n must be non-zero so that the oligonucleotide includes at least two individual internucleotidic linkages with different stereochemistry relative to one another; and
wherein the sum of n1-ny is between 2 and 200, and in some embodiments is between a lower limit selected from the group consisting of 2, 3, 4, 5, 6, 7, 8, 9, 10, 11, 12, 13, 14, 15, 16, 17, 18, 19, 20, 21, 22, 23, 24, 25 or more and an upper limit selected from the group consisting of 5, 10, 15, 20, 25, 30, 35, 40, 45, 50, 55, 60, 65, 70, 75, 80, 85, 90, 95, 100, 110, 120, 130, 140, 150, 160, 170, 180, 190, and 200, the upper limit being larger than the lower limit.

[1014] In some such embodiments, each n has the same value; in some embodiments, each even n has the same value as each other even n; in some embodiments, each odd n has the same value each other odd n; in some embodiments, at least two even ns have different values from one another; in some embodiments, at least two odd ns have different values from one another.

[1015] In some embodiments, at least two adjacent ns are equal to one another, so that a provided oligonucleotide includes adjacent blocks of S stereochemistry linkages and R stereochemistry linkages of equal lengths. In some embodiments, provided oligonucleotides include repeating blocks of S and R stereochemistry linkages of equal lengths. In some embodiments, provided oligonucleotides include repeating blocks of S and R stereochemistry linkages, where at least two such blocks are of different lengths from one another; in some such embodiments each S stereochemistry block is of the same length, and is of a different length from each R stereochemistry length, which may optionally be of the same length as one another.

[1016] In some embodiments, at least two skip-adjacent ns are equal to one another, so that a provided oligonucleotide includes at least two blocks of linkages of a first steroechemistry that are equal in length to one another and are separated by a block of linkages of the other stereochemistry, which separating block may be of the same length or a different length from the blocks of first steroechemistry.

[1017] In some embodiments, ns associated with linkage blocks at the ends of a provided oligonucleotide are of the same length. In some embodiments, provided oligonucleotides have terminal blocks of the same linkage stereochemistry. In some such embodiments, the terminal blocks are separated from one another by a middle block of the other linkage stereochemistry.

[1018] In some embodiments, a provided oligonucleotide of formula [S^{B}n1R^{B}n2S^{B}n3R^{B}n4 . . . S^{B}nxR^{B}ny] is a stereoblockmer. In some embodiments, a provided oligonucleotide of formula [S^{B}n1R^{B}n2S^{B}n3R^{B}n4 . . . S^{B}nxR^{B}ny] is a stereoskipmer. In some embodiments, a provided oligonucleotide of formula [S^{B}n1R^{B}n2S^{B}n3R^{B}n4 . . . S^{B}nxR^{B}ny] is a stereoaltmer. In some embodiments, a provided oligonucleotide of formula [S^{B}n1R^{B}n2S^{B}n3R^{B}n4 . . . S^{B}nxR^{B}ny] is a gapmer.

[1019] In some embodiments, a provided oligonucleotide of formula [S^{B}n1R^{B}n2S^{B}n3R^{B}n4 . . . S^{B}nxR^{B}ny] is of any of the above described patterns and further comprises patterns of P-modifications. For instance, in some embodiments, a provided oligonucleotide of formula [S^{B}n1R^{B}n2S^{B}n3R^{B}n4 . . . S^{B}nxR^{B}ny] and is a stereoskipmer and P-modification skipmer. In some embodiments, a provided oligonucleotide of formula [S^{B}n1R^{B}n2S^{B}n3R^{B}n4 . . . S^{B}nxR^{B}ny] and is a stereoblockmer and P-modification altmer. In some embodiments, a provided oligonucleotide of formula [S^{B}n1R^{B}n2S^{B}n3R^{B}n4 . . . S^{B}nxR^{B}ny] and is a stereoaltmer and P-modification blockmer.

[1020] In some embodiments, a provided oligonucleotide, for example, an oligonucleotide of formula [S^{B}n1R^{B}n2S^{B}n3R^{B}n4 . . . S^{B}nxR^{B}ny], is a chirally controlled oligonucleotide comprising one or more modified internuceotidic linkages independently having the structure of formula I:

[chemical structure]

wherein:
[1021] P* is an asymmetric phosphorus atom and is either Rp or Sp;
[1022] W is O, S or Se;
[1023] each of X, Y and Z is independently —O—, —S—, —N(-L-R¹)—, or L;
[1024] L is a covalent bond or an optionally substituted, linear or branched C₁-C₁₀ alkylene, wherein one or more methylene units of L are optionally and independently replaced by an optionally substituted group selected from C₁-C₆ alkylene, C₁-C₆ alkenylene, —C≡C—, a C₁-C₆ heteroaliphatic moiety, —C(R′)₂—, -Cy-, —O—, —S—, —S—S—, —N(R′)—, —C(O)—, —C(S)—, —C(NR′)—, —C(O)N(R′)—, —N(R′)C(O)N(R′)—, —N(R′)C(O)—, —N(R′)C(O)O—, —OC(O)N(R′)—, —S(O)—, —S(O)₂—, —S(O)₂N(R′)—, —N(R′)S(O)₂— —SC(O)—, —C(O)S—, —OC(O)—, and —C(O)O—;
[1025] R¹ is halogen, R, or an optionally substituted C₁-C₅₀ aliphatic wherein one or more methylene units are optionally and independently replaced by an optionally substituted group selected from C₁-C₆ alkylene, C₁-C₆ alkenylene, —C≡C—, a C₁-C₆ heteroaliphatic moiety, —C(R′)₂—, -Cy-, —O—, —S—, —S—S—, —N(R′)—, —C(O)—, —C(S)—, —C(NR′)—, —C(O)N(R′)—, —N(R′)C(O)N(R′)—, —N(R′)C(O)—, —N(R′)C(O)O—, —OC(O)N(R′)—, —S(O)—, —S(O)₂—, —S(O)₂N(R′)—, —N(R′)S(O)₂— —SC(O)—, —C(O)S—, —OC(O)—, and —C(O)O—
[1026] each R′ is independently —R, —C(O)R, —CO₂R, or —SO₂R, or:
   [1027] two R′ are taken together with their intervening atoms to form an optionally substituted aryl, carbocyclic, heterocyclic, or heteroaryl ring;
[1028] -Cy- is an optionally substituted bivalent ring selected from phenylene, carbocyclylene, arylene, heteroarylene, and heterocyclylene;
[1029] each R is independently hydrogen, or an optionally substituted group selected from C₁-C₆ aliphatic, carbocyclyl, aryl, heteroaryl, and heterocyclyl; and
[1030] each

[chemical structure]

independently represents a connection to a nucleoside.

[1031] In some embodiments, a chirally controlled oligonucleotide comprises one or more modified internucleotidic phosphorus linkages. In some embodiments, a chirally controlled oligonucleotide comprises, e.g., a phosphorothioate or a phosphorothioate triester linkage. In some embodiments, a chirally controlled oligonucleotide comprises a phosphorothioate triester linkage. In some embodiments, a chirally controlled oligonucleotide comprises at least two phosphorothioate triester linkages. In some embodiments, a chirally controlled oligonucleotide comprises at least three phosphorothioate triester linkages. In some embodiments, a chirally controlled oligonucleotide comprises at least four phosphorothioate triester linkages. In some embodiments, a chirally controlled oligonucleotide comprises at least five phosphorothioate triester linkages. Example such modified internucleotidic phosphorus linkages are described further herein.

[1032] In some embodiments, a chirally controlled oligonucleotide comprises different internucleotidic phosphorus linkages. In some embodiments, a chirally controlled oligonucleotide comprises at least one phosphate diester internucleotidic linkage and at least one modified internucleotidic linkage. In some embodiments, a chirally controlled oligonucleotide comprises at least one phosphate diester internucleotidic linkage and at least one phosphorothioate triester linkage. In some embodiments, a chirally controlled oligonucleotide comprises at least one phosphate diester internucleotidic linkage and at least two phosphorothioate triester linkages. In some embodiments, a chirally controlled oligonucleotide comprises at least one phosphate diester internucleotidic linkage and at least three phosphorothioate triester linkages. In some embodiments, a chirally controlled oligonucleotide comprises at least one phosphate diester internucleotidic linkage and at least four phosphorothioate triester linkages. In some embodiments, a chirally controlled oligonucleotide comprises at least one phosphate diester internucleotidic linkage and at least five phosphorothioate triester linkages. Example such modified internucleotidic phosphorus linkages are described further herein.

[1033] In some embodiments, a phosphorothioate triester linkage comprises a chiral auxiliary, which, for example, is used to control the stereoselectivity of a reaction. In some embodiments, a phosphorothioate triester linkage does not comprise a chiral auxiliary. In some embodiments, a phosphorothioate triester linkage is intentionally maintained until and/or during the administration to a subject.

[1034] In some embodiments, a chirally controlled oligonucleotide is linked to a solid support. In some embodiments, a chirally controlled oligonucleotide is cleaved from a solid support.

[1035] In some embodiments, a chirally controlled oligonucleotide comprises at least one phosphate diester internucleotidic linkage and at least two consecutive modified internucleotidic linkages. In some embodiments, a chirally controlled oligonucleotide comprises at least one phosphate diester internucleotidic linkage and at least two consecutive phosphorothioate triester internucleotidic linkages.

[1036] In some embodiments, a chirally controlled oligonucleotide is a blockmer. In some embodiments, a chirally controlled oligonucleotide is a stereoblockmer. In some embodiments, a chirally controlled oligonucleotide is a P-modification blockmer. In some embodiments, a chirally controlled oligonucleotide is a linkage blockmer.

[1037] In some embodiments, a chirally controlled oligonucleotide is an altmer. In some embodiments, a chirally controlled oligonucleotide is a stereoaltmer. In some embodiments, a chirally controlled oligonucleotide is a P-modification altmer. In some embodiments, a chirally controlled oligonucleotide is a linkage altmer.

[1038] In some embodiments, a chirally controlled oligonucleotide is a unimer. In some embodiments, a chirally controlled oligonucleotide is a stereounimer. In some embodiments, a chirally controlled oligonucleotide is a P-modification unimer. In some embodiments, a chirally controlled oligonucleotide is a linkage unimer.

[1039] In some embodiments, a chirally controlled oligonucleotide is a gapmer.

[1040] In some embodiments, a chirally controlled oligonucleotide is a skipmer.

[1041] In some embodiments, the present disclosure provides oligonucleotides comprising one or more modified internucleotidic linkages independently having the structure of formula I:

[chemical structure]

wherein:
[1042] P* is an asymmetric phosphorus atom and is either Rp or Sp;
[1043] W is O, S or Se;
[1044] each of X, Y and Z is independently —O—, —S—, —N(-L-R¹)—, or L;
[1045] L is a covalent bond or an optionally substituted, linear or branched C₁-C₁₀ alkylene, wherein one or more methylene units of L are optionally and independently replaced by an optionally substituted group selected from C₁-C₆ alkylene, C₁-C₆ alkenylene, —C≡C—, a C₁-C₆ heteroaliphatic moiety, —C(R′)₂—, -Cy-, —O—, —S—, —S—S—, —N(R′)—, —C(O)—, —C(S)—, —C(NR′)—, —C(O)N(R′)—, —N(R′)C(O)N(R′)—, —N(R′)C(O)—, —N(R′)C(O)O—, —OC(O)N(R′)—, —S(O)—, —S(O)₂—, —S(O)₂N(R′)—, —N(R′)S(O)₂— —SC(O)—, —C(O)S—, —OC(O)—, and —C(O)O—;
[1046] R¹ is halogen, R, or an optionally substituted C₁-C₅₀ aliphatic wherein one or more methylene units are optionally and independently replaced by an optionally substituted group selected from C₁-C₆ alkylene, C₁-C₆ alkenylene, —C≡C—, a C₁-C₆ heteroaliphatic moiety, —C(R′)₂—, -Cy-, —O—, —S—, —S—S—, —N(R′)—, —C(O)—, —C(S)—, —C(NR′)—, —C(O)N(R′)—, —N(R′)C(O)N(R′)—, —N(R′)C(O)—, —N(R′)C(O)O—, —OC(O)N(R′)—, —S(O)—, —S(O)₂—, —S(O)₂N(R′)—, —N(R′)S(O)₂— —SC(O)—, —C(O)S—, —OC(O)—, and —C(O)O—
[1047] each R′ is independently —R, —C(O)R, —CO₂R, or —SO₂R, or:
   [1048] two R′ are taken together with their intervening atoms to form an optionally substituted aryl, carbocyclic, heterocyclic, or heteroaryl ring;
[1049] -Cy- is an optionally substituted bivalent ring selected from phenylene, carbocyclylene, arylene, heteroarylene, and heterocyclylene;
[1050] each R is independently hydrogen, or an optionally substituted group selected from C₁-C₆ aliphatic, carbocyclyl, aryl, heteroaryl, and heterocyclyl; and
[1051] each

[chemical structure]

independently represents a connection to a nucleoside.

[1052] In some embodiments, a modified internucleotidic linkage is phosphorothioate. Examples of internucleotidic linkages having the structure of formula (I) are widely known in the art, including but not limited to those described in US 20110294124, US 20120316224, US 20140194610, US 20150211006, US 20150197540, WO 2015107425, PCT/US2016/043542, and PCT/US2016/043598, each of which is incorporated herein by reference.

[1053] Non-limiting examples of internucleotidic linkages also include those described in the art, including, but not limited to, those described in any of: Gryaznov, S.; Chen, J.-K. J. Am. Chem. Soc. 1994, 116, 3143, Jones et al. J. Org. Chem. 1993, 58, 2983, Koshkin et al. 1998 Tetrahedron 54: 3607-3630, Lauritsen et al. 2002 Chem. Comm. 5: 530-531, Lauritsen et al. 2003 Bioo. Med. Chem. Lett. 13: 253-256, Mesmaeker et al. Angew. Chem., Int. Ed. Engl. 1994, 33, 226, Petersen et al. 2003 TRENDS Biotech. 21: 74-81, Schultz et al. 1996 Nucleic Acids Res. 24: 2966, Ts'o et al. 1988 Ann. N. Y. Acad. Sci. 507: 220, and Vasseur et al. J. Am. Chem. Soc. 1992, 114, 4006; and those described in Carbohydrate Modifications in Antisense Research; Sanghvi and Cook, eds., ACS Symposium Series 580: Chapters 3 and 4, 40-65).

[1054] In some embodiments, P* is an asymmetric phosphorus atom and is either Rp or Sp. In some embodiments, P* is Rp. In other embodiments, P* is Sp. In some embodiments, an oligonucleotide comprises one or more internucleotidic linkages of formula I wherein each P* is independently Rp or Sp. In some embodiments, an oligonucleotide comprises one or more internucleotidic linkages of formula I wherein each P* is Rp. In some embodiments, an oligonucleotide comprises one or more internucleotidic linkages of formula I wherein each P* is Sp. In some embodiments, an oligonucleotide comprises at least one internucleotidic linkage of formula I wherein P* is Rp. In some embodiments, an oligonucleotide comprises at least one internucleotidic linkage of formula I wherein P* is Sp. In some embodiments, an oligonucleotide comprises at least one internucleotidic linkage of formula I wherein P* is Rp, and at least one internucleotidic linkage of formula I wherein P* is Sp.

[1055] In some embodiments, W is O, S, or Se. In some embodiments, W is O. In some embodiments, W is S. In some embodiments, W is Se. In some embodiments, an oligonucleotide comprises at least one internucleotidic linkage of formula I wherein W is O. In some embodiments, an oligonucleotide comprises at least one internucleotidic linkage of formula I wherein W is S. In some embodiments, an oligonucleotide comprises at least one internucleotidic linkage of formula I wherein W is Se.

[1056] In some embodiments, each R is independently hydrogen, or an optionally substituted group selected from C₁-C₆ aliphatic, phenyl, carbocyclyl, aryl, heteroaryl, and heterocyclyl.

[1057] In some embodiments, R is hydrogen. In some embodiments, R is an optionally substituted group selected from C₁-C₆ aliphatic, phenyl, carbocyclyl, aryl, heteroaryl, or heterocyclyl.

[1058] In some embodiments, R is an optionally substituted C₁-C₆ aliphatic. In some embodiments, R is an optionally substituted C₁-C₆ alkyl. In some embodiments, R is optionally substituted, linear or branched hexyl. In some embodiments, R is optionally substituted, linear or branched pentyl. In some embodiments, R is optionally substituted, linear or branched butyl. In some embodiments, R is optionally substituted, linear or branched propyl. In some embodiments, R is optionally substituted ethyl. In some embodiments, R is optionally substituted methyl.

[1059] In some embodiments, R is optionally substituted phenyl. In some embodiments, R is substituted phenyl. In some embodiments, R is phenyl.

[1060] In some embodiments, R is optionally substituted carbocyclyl. In some embodiments, R is optionally substituted C₃-C₁₀ carbocyclyl. In some embodiments, R is optionally substituted monocyclic carbocyclyl. In some embodiments, R is optionally substituted cycloheptyl. In some embodiments, R is optionally substituted cyclohexyl. In some embodiments, R is optionally substituted cyclopentyl. In some embodiments, R is optionally substituted cyclobutyl. In some embodiments, R is an optionally substituted cyclopropyl. In some embodiments, R is optionally substituted bicyclic carbocyclyl.

[1061] In some embodiments, R is an optionally substituted aryl. In some embodiments, R is an optionally substituted bicyclic aryl ring.

[1062] In some embodiments, R is an optionally substituted heteroaryl. In some embodiments, R is an optionally substituted 5-6 membered monocyclic heteroaryl ring having 1-3 heteroatoms independently selected from nitrogen, sulfur, or oxygen. In some embodiments, R is a substituted 5-6 membered monocyclic heteroaryl ring having 1-3 heteroatoms independently selected from nitrogen, oxygen, or sulfur. In some embodiments, R is an unsubstituted 5-6 membered monocyclic heteroaryl ring having 1-3 heteroatoms independently selected from nitrogen, sulfur, or oxygen.

[1063] In some embodiments, R is an optionally substituted 5 membered monocyclic heteroaryl ring having 1-3 heteroatoms independently selected from nitrogen, oxygen or sulfur. In some embodiments, R is an optionally substituted 6 membered monocyclic heteroaryl ring having 1-3 heteroatoms independently selected from nitrogen, oxygen, or sulfur.

[1064] In some embodiments, R is an optionally substituted 5-membered monocyclic heteroaryl ring having 1 heteroatom selected from nitrogen, oxygen, or sulfur. In some embodiments, R is selected from pyrrolyl, furanyl, or thienyl.

[1065] In some embodiments, R is an optionally substituted 5-membered heteroaryl ring having 2 heteroatoms independently selected from nitrogen, oxygen, or sulfur. In certain embodiments, R is an optionally substituted 5-membered heteroaryl ring having 1 nitrogen atom, and an additional heteroatom selected from sulfur or oxygen. Example R groups include optionally substituted pyrazolyl, imidazolyl, thiazolyl, isothiazolyl, oxazolyl or isoxazolyl.

[1066] In some embodiments, R is a 6-membered heteroaryl ring having 1-3 nitrogen atoms. In other embodiments, R is an optionally substituted 6-membered heteroaryl ring having 1-2 nitrogen atoms. In some embodiments, R is an optionally substituted 6-membered heteroaryl ring having 2 nitrogen atoms. In certain embodiments, R is an optionally substituted 6-membered heteroaryl ring having 1 nitrogen. Example R groups include optionally substituted pyridinyl, pyrimidinyl, pyrazinyl, pyridazinyl, triazinyl, or tetrazinyl.

[1067] In certain embodiments, R is an optionally substituted 8-10 membered bicyclic heteroaryl ring having 1-4 heteroatoms independently selected from nitrogen, oxygen, or sulfur. In some embodiments, R is an optionally substituted 5,6-fused heteroaryl ring having 1-4 heteroatoms independently selected from nitrogen, oxygen, or sulfur. In other embodiments, R is an optionally substituted 5,6-fused heteroaryl ring having 1-2 heteroatoms independently selected from nitrogen, oxygen, or sulfur. In certain embodiments, R is an optionally substituted 5,6-fused heteroaryl ring having 1 heteroatom independently selected from nitrogen, oxygen, or sulfur. In some embodiments, R is an optionally substituted indolyl. In some embodiments, R is an optionally substituted azabicyclo[3.2.1]octanyl. In certain embodiments, R is an optionally substituted 5,6-fused heteroaryl ring having 2 heteroatoms independently selected from nitrogen, oxygen, or sulfur. In some embodiments, R is an optionally substituted azaindolyl. In some embodiments, R is an optionally substituted benzimidazolyl. In some embodiments, R is an optionally substituted benzothiazolyl. In some embodiments, R is an optionally substituted benzoxazolyl. In some embodiments, R is an optionally substituted indazolyl. In certain embodiments, R is an optionally substituted 5,6-fused heteroaryl ring having 3 heteroatoms independently selected from nitrogen, oxygen, or sulfur.

[1068] In certain embodiments, R is an optionally substituted 6,6-fused heteroaryl ring having 1-4 heteroatoms independently selected from nitrogen, oxygen, or sulfur. In some embodiments, R is an optionally substituted 6,6-fused heteroaryl ring having 1-2 heteroatoms independently selected from nitrogen, oxygen, or sulfur. In other embodiments, R is an optionally substituted 6,6-fused heteroaryl ring having 1 heteroatom independently selected from nitrogen, oxygen, or sulfur. In some embodiments, R is an optionally substituted quinolinyl. In some embodiments, R is an optionally substituted isoquinolinyl. According to one aspect, R is an optionally substituted 6,6-fused heteroaryl ring having 2 heteroatoms independently selected from nitrogen, oxygen, or sulfur. In some embodiments, R is a quinazoline or a quinoxaline.

[1069] In some embodiments, R is an optionally substituted heterocyclyl. In some embodiments, R is an optionally substituted 3-7 membered saturated or partially unsaturated heterocyclic ring having 1-2 heteroatoms independently selected from nitrogen, oxygen, or sulfur. In some embodiments, R is a substituted 3-7 membered saturated or partially unsaturated heterocyclic ring having 1-2 heteroatoms independently selected from nitrogen, oxygen, or sulfur. In some embodiments, R is an unsubstituted 3-7 membered saturated or partially unsaturated heterocyclic ring having 1-2 heteroatoms independently selected from nitrogen, oxygen, or sulfur.

[1070] In some embodiments, R is an optionally substituted heterocyclyl. In some embodiments, R is an optionally substituted 6 membered saturated or partially unsaturated heterocyclic ring having 1-2 heteroatoms independently selected from nitrogen, oxygen, or sulfur. In some embodiments, R is an optionally substituted 6 membered partially unsaturated heterocyclic ring having 2 heteroatoms independently selected from nitrogen, oxygen, or sulfur. In some embodiments, R is an optionally substituted 6 membered partially unsaturated heterocyclic ring having 2 oxygen atom.

[1071] In certain embodiments, R is a 3-7 membered saturated or partially unsaturated heterocyclic ring having 1-2 heteroatoms independently selected from nitrogen, oxygen, or sulfur. In certain embodiments, R is oxiranyl, oxetanyl, tetrahydrofuranyl, tetrahydropyranyl, oxepaneyl, aziridineyl, azetidineyl, pyrrolidinyl, piperidinyl, azepanyl, thiiranyl, thietanyl, tetrahydrothiophenyl, tetrahydrothiopyranyl, thiepanyl, dioxolanyl, oxathiolanyl, oxazolidinyl, imidazolidinyl, thiazolidinyl, dithiolanyl, dioxanyl, morpholinyl, oxathianyl, piperazinyl, thiomorpholinyl, dithianyl, dioxepanyl, oxazepanyl, oxathiepanyl, dithiepanyl, diazepanyl, dihydrofuranonyl, tetrahydropyranonyl, oxepanonyl, pyrolidinonyl, piperidinonyl, azepanonyl, dihydrothiophenonyl, tetrahydrothiopyranonyl, thiepanonyl, oxazolidinonyl, oxazinanonyl, oxazepanonyl, dioxolanonyl, dioxanonyl, dioxepanonyl, oxathiolinonyl, oxathianonyl, oxathiepanonyl, thiazolidinonyl, thiazinanonyl, thiazepanonyl, imidazolidinonyl, tetrahydropyrimidinonyl, diazepanonyl, imidazolidinedionyl, oxazolidinedionyl, thiazolidinedionyl, dioxolanedionyl, oxathiolanedionyl, piperazinedionyl, morpholinedionyl, thiomorpholinedionyl, tetrahydropyranyl, tetrahydrofuranyl, morpholinyl, thiomorpholinyl, piperidinyl, piperazinyl, pyrrolidinyl, tetrahydrothiophenyl, or tetrahydrothiopyranyl. In some embodiments, R is an optionally substituted 5 membered saturated or partially unsaturated heterocyclic ring having 1-2 heteroatoms independently selected from nitrogen, oxygen, or sulfur.

[1072] In certain embodiments, R is an optionally substituted 5-6 membered partially unsaturated monocyclic ring having 1-2 heteroatoms independently selected from nitrogen, oxygen, or sulfur. In certain embodiments, R is an optionally substituted tetrahydropyridinyl, dihydrothiazolyl, dihydrooxazolyl, or oxazolinyl group.

[1073] In some embodiments, R is an optionally substituted 8-10 membered bicyclic saturated or partially unsaturated heterocyclic ring having 1-4 heteroatoms independently selected from nitrogen, oxygen, or sulfur. In some embodiments, R is an optionally substituted indolinyl. In some embodiments, R is an optionally substituted isoindolinyl. In some embodiments, R is an optionally substituted 1, 2, 3, 4-tetrahydroquinoline. In some embodiments, R is an optionally substituted 1, 2, 3, 4-tetrahydroisoquinoline.

[1074] In some embodiments, each R′ is independently —R, —C(O)R, —CO₂R, or —SO₂R, or:
[1075] two R′ on the same nitrogen are taken together with their intervening atoms to form an optionally substituted heterocyclic or heteroaryl ring, or
[1076] two R′ on the same carbon are taken together with their intervening atoms to form an optionally substituted aryl, carbocyclic, heterocyclic, or heteroaryl ring.

[1077] In some embodiments, R′ is —R, —C(O)R, —CO₂R, or —SO₂R, wherein R is as defined above and described herein.

[1078] In some embodiments, R′ is —R, wherein R is as defined and described above and herein. In some embodiments, R′ is hydrogen.

[1079] In some embodiments, R′ is —C(O)R, wherein R is as defined above and described herein. In some embodiments, R′ is —CO₂R, wherein R is as defined above and described herein. In some embodiments, R′ is —SO₂R, wherein R is as defined above and described herein.

[1080] In some embodiments, two R′ on the same nitrogen are taken together with their intervening atoms to form an optionally substituted heterocyclic or heteroaryl ring. In some embodiments, two R′ on the same carbon are taken together with their intervening atoms to form an optionally substituted aryl, carbocyclic, heterocyclic, or heteroaryl ring.

[1081] In some embodiments, -Cy- is an optionally substituted bivalent ring selected from carbocyclylene, arylene, heteroarylene, or heterocyclylene.

[1082] In some embodiments, -Cy- is optionally substituted phenylene. In some embodiments, -Cy- is optionally substituted carbocyclylene. In some embodiments, -Cy- is optionally substituted arylene. In some embodiments, -Cy- is optionally substituted heteroarylene. In some embodiments, -Cy- is optionally substituted heterocyclylene.

[1083] In some embodiments, each of X, Y and Z is independently —O—, —S—, —N(-L-R¹)—, or L, wherein each of L and R¹ is independently as defined above and described below.

[1084] In some embodiments, X is —O—. In some embodiments, X is —S—. In some embodiments, X is —O— or —S—. In some embodiments, an oligonucleotide comprises at least one internucleotidic linkage of formula I wherein X is —O—. In some embodiments, an oligonucleotide comprises at least one internucleotidic linkage of formula I wherein X is —S—. In some embodiments, an oligonucleotide comprises at least one internucleotidic linkage of formula I wherein X is —O—, and at least one internucleotidic linkage of formula I wherein X is —S—. In some embodiments, an oligonucleotide comprises at least one internucleotidic linkage of formula I wherein X is —O—, and at least one internucleotidic linkage of formula I wherein X is —S—, and at least one internucleotidic linkage of formula I wherein L is an optionally substituted, linear or branched C₁-C₁₀ alkylene, wherein one or more methylene units of L are optionally and independently replaced by an optionally substituted C₁-C₆ alkylene, C₁-C₆ alkenylene, —C≡C—, —C(R′)₂—, -Cy-, —O—, —S—, —S—S—, —N(R′)—, —C(O)—, —C(S)—, —C(NR′)—, —C(O)N(R′)—, —N(R′)C(O)N(R′)—, —N(R′)C(O)—, —N(R′)C(O)O—, —OC(O)N(R′)—, —S(O)—, —S(O)₂—, —S(O)₂N(R′)—, —N(R′)S(O)₂—, —SC(O)—, —C(O)S—, —OC(O)—, and —C(O)O—.

[1085] In some embodiments, X is —N(-L-R¹)—. In some embodiments, X is —N(R¹)—. In some embodiments, X is —N(R′)—. In some embodiments, X is —N(R)—. In some embodiments, X is —NH—.

[1086] In some embodiments, X is L. In some embodiments, X is a covalent bond. In some embodiments, X is or an optionally substituted, linear or branched C₁-C₀₁ alkylene, wherein one or more methylene units of L are optionally and independently replaced by an optionally substituted C₁-C₆ alkylene, C₁-C₆ alkenylene, —C≡C—, —C(R′)₂—, -Cy-, —O—, —S—, —S—S—, —N(R′)—, —C(O)—, —C(S)—, —C(NR′)—, —C(O)N(R′)—, —N(R′)C(O)N(R′)—, —N(R′)C(O)—, —N(R′)C(O)O—, —OC(O)N(R′)—, —S(O)—, —S(O)₂—, —S(O)₂N(R′)—, —N(R′)S(O)₂—, —SC(O)—, —C(O)S—, —OC(O)—, or —C(O)O—. In some embodiments, X is an optionally substituted C₁-C₁₀ alkylene or C₁-C₁₀ alkenylene. In some embodiments, X is methylene.

[1087] In some embodiments, Y is —O—. In some embodiments, Y is —S—.

[1088] In some embodiments, Y is —N(-L-R¹)—. In some embodiments, Y is —N(R¹)—.

[1089] In some embodiments, Y is —N(R′)—. In some embodiments, Y is —N(R)—. In some embodiments, Y is —NH—.

[1090] In some embodiments, Y is L. In some embodiments, Y is a covalent bond. In some embodiments, Y is or an optionally substituted, linear or branched C₁-C₁₀ alkylene, wherein one or more methylene units of L are optionally and independently replaced by an optionally substituted C₁-C₆ alkylene, C₁-C₆ alkenylene, —C≡C—, —C(R′)₂—, -Cy-, —O—, —S—, —S—S—, —N(R′)—, —C(O)—, —C(S)—, —C(NR′)—, —C(O)N(R′)—, —N(R′)C(O)N(R′)—, —N(R′)C(O)—, —N(R′)C(O)O—, —OC(O)N(R′)—, —S(O)—, —S(O)₂—, —S(O)₂N(R′)—, —N(R′)S(O)₂—, —SC(O)—, —C(O)S—, —OC(O)—, or —C(O)O—. In some embodiments, Y is an optionally substituted C₁-C₁₀ alkylene or C₁-C₁₀ alkenylene. In some embodiments, Y is methylene.

[1091] In some embodiments, Z is —O—. In some embodiments, Z is —S—.

[1092] In some embodiments, Z is —N(-L-R¹)—. In some embodiments, Z is —N(R¹)—. In some embodiments, Z is —N(R′)—. In some embodiments, Z is —N(R)—. In some embodiments, Z is —NH—.

[1093] In some embodiments, Z is L. In some embodiments, Z is a covalent bond. In some embodiments, Z is or an optionally substituted, linear or branched C₁-C₁₀ alkylene, wherein one or more methylene units of L are optionally and independently replaced by an optionally substituted C₁-C₆ alkylene, C₁-C₆ alkenylene, —C≡C—, —C(R′)₂—, -Cy-, —O—, —S—, —S—S—, —N(R′)—, —C(O)—, —C(S)—, —C(NR′)—, —C(O)N(R′)—, —N(R′)C(O)N(R′)—, —N(R′)C(O)—, —N(R′)C(O)O—, —OC(O)N(R′)—, —S(O)—, —S(O)₂—, —S(O)₂N(R′)—, —N(R′)S(O)₂—, —SC(O)—, —C(O)S—, —OC(O)—, or —C(O)O—. In some embodiments, Z is an optionally substituted C₁-C₁₀ alkylene or C₁-C₁₀ alkenylene. In some embodiments, Z is methylene.

[1094] In some embodiments, L is a covalent bond or an optionally substituted, linear or branched C₁-C₁₀ alkylene, wherein one or more methylene units of L are optionally and independently replaced by an optionally substituted C₁-C₆ alkylene, C₁-C₆ alkenylene, —C≡C—, —C(R′)₂—, -Cy-, —O—, —S—, —S—S—, —N(R′)—, —C(O)—, —C(S)—, —C(NR′)—, —C(O)N(R′)—, —N(R′)C(O)N(R′)—, —N(R′)C(O)—, —N(R′)C(O)O—, —OC(O)N(R′)—, —S(O)—, —S(O)₂—, —S(O)₂N(R′)—, —N(R′)S(O)₂—, —SC(O)—, —C(O)S—, —OC(O)—, or —C(O)O—.

[1095] In some embodiments, L is a covalent bond. In some embodiments, L is an optionally substituted, linear or branched C₁-C₁₀ alkylene, wherein one or more methylene units of L are optionally and independently replaced by an optionally substituted C₁-C₆ alkylene, C₁-C₆ alkenylene, —C≡C—, —C(R′)₂—, -Cy-, —O—, —S—, —S—S—, —N(R′)—, —C(O)—, —C(S)—, —C(NR′)—, —C(O)N(R′)—, —N(R′)C(O)N(R′)—, —N(R′)C(O)—, —N(R′)C(O)O—, —OC(O)N(R′)—, —S(O)—, —S(O)₂—, —S(O)₂N(R′)—, —N(R′)S(O)₂—, —SC(O)—, —C(O)S—, —OC(O)—, or —C(O)O—.

[1096] In some embodiments, L has the structure of -L¹-V—, wherein: L¹ is an optionally substituted group selected from

[chemical structure]

C₁-C₆ alkylene, C₁-C₆ alkenylene, carbocyclylene, arylene, C₁-C₆ heteroalkylene, heterocyclylene, and heteroarylene;
V is selected from —O—, —S—, —NR′—, C(R′)₂, —S—S—, —B—S—S—C—,

[chemical structure]

or an optionally substituted group selected from C₁-C₆ alkylene, arylene, C₁-C₆ heteroalkylene, heterocyclylene, and heteroarylene;

### A is ═O, ═S, ═NR′, or ═C(R′)₂;

[1097] each of B and C is independently —O—, —S—, —NR′—, —C(R′)₂—, or an optionally substituted group selected from C₁-C₆ alkylene, carbocyclylene, arylene, heterocyclylene, or heteroarylene; and each R′ is independently as defined above and described herein.

[1098] In some embodiments, L¹ is

[chemical structure]

[1099] In some embodiments, L¹ is

[chemical structure]

wherein Ring Cy′ is an optionally substituted arylene, carbocyclylene, heteroarylene, or heterocyclylene. In some embodiments, L¹ is optionally substituted

[chemical structure]

In some embodiments, L¹ is

[chemical structure]

[1100] In some embodiments, L¹ is connected to X. In some embodiments, L¹ is an optionally substituted group selected from

[chemical structure]

and the sulfur atom is connect to V. In some embodiments, L¹ is an optionally substituted group selected from

[chemical structure]

and the carbon atom is connect to X.

[chemical structure]

[1101] In some embodiments, L has the structure of:

wherein:

### E is —O—, —S—, —NR′— or —C(R′)₂—;

[1102] [symbol] is a single or double bond;
the two R^{L1} are taken together with the two carbon atoms to which they are bound to form an optionally substituted aryl, carbocyclic, heteroaryl or heterocyclic ring; and each R′ is independently as defined above and described herein.

[1103] In some embodiments, L has the structure of:

[chemical structure]

wherein:
[1104] G is —O—, —S—, or —NR′;
[1105] [symbol] is a single or double bond; and
   the two R^{L1} are taken together with the two carbon atoms to which they are bound to form an optionally substituted aryl, C₃-C₁₀ carbocyclic, heteroaryl or heterocyclic ring.

[1106] In some embodiments, L has the structure of:

[chemical structure]

wherein:
[1107] E is —O—, —S—, —NR′— or —C(R′)₂—;
[1108] D is ═N—, ═C(F)—, ═C(Cl)—, ═C(Br)—, ═C(I)—, ═C(CN)—, ═C(NO₂)—, ═C(CO₂—(C₁-C₆ aliphatic))—, or ═C(CF₃)—; and
[1109] each R′ is independently as defined above and described herein.

[1110] In some embodiments, L has the structure of:

[chemical structure]

wherein:
[1111] G is —O—, —S—, or —NR′;
[1112] D is ═N—, ═C(F)—, ═C(Cl)—, ═C(Br)—, ═C(I)—, ═C(CN)—, ═C(NO₂)—, ═C(CO₂—(C₁-C₆ aliphatic))—, or ═C(CF₃)—.

[1113] In some embodiments, L has the structure of:

[chemical structure]

wherein:
[1114] E is —O—, —S—, —NR′— or —C(R′)₂—;
[1115] D is ═N—, ═C(F)—, ═C(Cl)—, ═C(Br)—, ═C(I)—, ═C(CN)—, ═C(NO₂)—, ═C(CO₂—(C₁-C₆ aliphatic))—, or ═C(CF₃)—; and
[1116] each R′ is independently as defined above and described herein.

[1117] In some embodiments, L has the structure of:

[chemical structure]

wherein:
[1118] G is —O—, —S—, or —NR′;
[1119] D is ═N—, ═C(F)—, ═C(Cl)—, ═C(Br)—, ═C(I)—, ═C(CN)—, ═C(NO₂)—, ═C(CO₂—(C₁-C₆ aliphatic))—, or ═C(CF₃)—.

[1120] In some embodiments, L has the structure of:

[chemical structure]

wherein:
[1121] E is —O—, —S—, —NR′— or —C(R′)₂—;
[1122] [symbol] is a single or double bond;
[1123] the two R^{L1} are taken together with the two carbon atoms to which they are bound to form an optionally substituted aryl, C₃-C₁₀ carbocyclic, heteroaryl or heterocyclic ring; and each R′ is independently as defined above and described herein.

[1124] In some embodiments, L has the structure of:

[chemical structure]

wherein:
[1125] G is —O—, —S—, or —NR′;
[1126] [symbol] is a single or double bond;
[1127] the two R^{L1} are taken together with the two carbon atoms to which they are bound to form an optionally substituted aryl, C₃-C₁₀ carbocyclic, heteroaryl or heterocyclic ring; and each R′ is independently as defined above and described herein.

[1128] In some embodiments, L has the structure of:

[chemical structure]

wherein:
[1129] E is —O—, —S—, —NR′— or —C(R′)₂—;
[1130] D is ═N—, ═C(F)—, ═C(Cl)—, ═C(Br)—, ═C(I)—, ═C(CN)—, ═C(NO₂)—, ═C(CO₂—(C₁-C₆ aliphatic))—, or ═C(CF₃)—; and
[1131] each R′ is independently as defined above and described herein.

[1132] In some embodiments, L has the structure of:

[chemical structure]

wherein:
[1133] G is —O—, —S—, or —NR′;
[1134] D is ═N—, ═C(F)—, ═C(Cl)—, ═C(Br)—, ═C(I)—, ═C(CN)—, ═C(NO₂)—, ═C(CO₂—(C₁-C₆ aliphatic))—, or ═C(CF₃)—; and
[1135] each R′ is independently as defined above and described herein.

[1136] In some embodiments, L has the structure of:

[chemical structure]

wherein:
[1137] E is —O—, —S—, —NR′— or —C(R′)₂—;
[1138] D is ═N—, ═C(F)—, ═C(Cl)—, ═C(Br)—, ═C(I)—, ═C(CN)—, ═C(NO₂)—, ═C(CO₂—(C₁-C₆ aliphatic))—, or ═C(CF₃)—; and
[1139] each R′ is independently as defined above and described herein.

[1140] In some embodiments, L has the structure of:

[chemical structure]

wherein:
[1141] G is —O—, —S—, or —NR′;
[1142] D is ═N—, ═C(F)—, ═C(Cl)—, ═C(Br)—, ═C(I)—, ═C(CN)—, ═C(NO₂)—, ═C(CO₂—(C₁-C₆ aliphatic))- or ═C(CF₃)—; and
[1143] each R′ is independently as defined above and described herein.

[1144] In some embodiments, L has the structure of:

[chemical structure]

wherein:
[1145] E is —O—, —S—, —NR′— or —C(R′)₂—;
[1146] [symbol] is a single or double bond;
[1147] the two R^{L1} are taken together with the two carbon atoms to which they are bound to form an optionally substituted aryl, C₃-C₁₀ carbocyclic, heteroaryl or heterocyclic ring; and each R′ is independently as defined above and described herein.

[1148] In some embodiments, L has the structure of:

[chemical structure]

wherein:
[1149] G is —O—, —S—, or —NR′;
[1150] [symbol] is a single or double bond;
[1151] the two R^{L1} are taken together with the two carbon atoms to which they are bound to form an optionally substituted aryl, C₃-C₁₀ carbocyclic, heteroaryl or heterocyclic ring; and each R′ is independently as defined above and described herein.

[1152] In some embodiments, L has the structure of:

[chemical structure]

wherein:
[1153] E is —O—, —S—, —NR′— or —C(R′)₂—;
[1154] D is ═N—, ═C(F)—, ═C(Cl)—, ═C(Br)—, ═C(I)—, ═C(CN)—, ═C(NO₂)—, ═C(CO₂—(C₁-C₆ aliphatic))—, or ═C(CF₃)—; and each R′ is independently as defined above and described herein.

[1155] In some embodiments, L has the structure of:

[chemical structure]

wherein:
[1156] G is —O—, —S—, or —NR′;
[1157] D is ═N—, ═C(F)—, ═C(Cl)—, ═C(Br)—, ═C(I)—, ═C(CN)—, ═C(NO₂)—, ═C(CO₂—(C₁-C₆ aliphatic))—, or ═C(CF₃)—; and
[1158] R′ is as defined above and described herein.

[1159] In some embodiments, L has the structure of:

[chemical structure]

wherein:
[1160] E is —O—, —S—, —NR′— or —C(R′)₂—;
[1161] D is ═N—, ═C(F)—, ═C(Cl)—, ═C(Br)—, ═C(I)—, ═C(CN)—, ═C(NO₂)—, ═C(CO₂—(C₁-C₆ aliphatic))—, or ═C(CF₃)—; and
[1162] each R′ is independently as defined above and described herein.

[1163] In some embodiments, L has the structure of:

[chemical structure]

wherein:
[1164] G is —O—, —S—, or —NR′;
[1165] D is ═N—, ═C(F)—, ═C(Cl)—, ═C(Br)—, ═C(I)—, ═C(CN)—, ═C(NO₂)—, ═C(CO₂—(C₁-C₆ aliphatic))—, or ═C(CF₃)—; and
[1166] R′ is as defined above and described herein.

[1167] In some embodiments, L has the structure of:

[chemical structure]

wherein the phenyl ring is optionally substituted. In some embodiments, the phenyl ring is not substituted. In some embodiments, the phenyl ring is substituted.

[1168] In some embodiments, L has the structure of:

[chemical structure]

wherein the phenyl ring is optionally substituted. In some embodiments, the phenyl ring is not substituted. In some embodiments, the phenyl ring is substituted.

[1169] In some embodiments, L has the structure of:

[chemical structure]

wherein:
[1170] [symbol] is a single or double bond; and
[1171] the two R^{L1} are taken together with the two carbon atoms to which they are bound to form an optionally substituted aryl, C₃-C₁₀ carbocyclic, heteroaryl or heterocyclic ring.

[1172] In some embodiments, L has the structure of:

[chemical structure]

wherein:
[1173] G is —O—, —S—, or —NR′;
[1174] [symbol] is a single or double bond; and
[1175] the two R^{L1} are taken together with the two carbon atoms to which they are bound to form an optionally substituted aryl, C₃-C₁₀ carbocyclic, heteroaryl or heterocyclic ring.

[1176] In some embodiments, E is —O—, —S—, —NR′— or —C(R′)₂—, wherein each R′ independently as defined above and described herein. In some embodiments, E is —O—, —S—, or —NR′—. In some embodiments, E is —O—, —S—, or —NH—. In some embodiments, E is —O—. In some embodiments, E is —S—. In some embodiments, E is —NH—.

[1177] In some embodiments, G is —O—, —S—, or —NR′, wherein each R′ independently as defined above and described herein. In some embodiments, G is —O—, —S—, or —NH—. In some embodiments, G is —O—. In some embodiments, G is —S—. In some embodiments, G is —NH—.

[1178] In some embodiments, L is -L³-G-, wherein:
[1179] L³ is an optionally substituted C₁-C₅ alkylene or alkenylene, wherein one or more methylene units are optionally and independently replaced by —O—, —S—, —N(R′)—, —C(O)—, —C(S)—, —C(NR′)—, —S(O)—, —S(O)₂—, or

[chemical structure]

and
wherein each of G, R′ and Ring Cy′ is independently as defined above and described herein.

[1180] In some embodiments, L is -L³-S—, wherein L³ is as defined above and described herein. In some embodiments, L is -L³-O—, wherein L³ is as defined above and described herein. In some embodiments, L is -L³-N(R′)—, wherein each of L³ and R′ is independently as defined above and described herein. In some embodiments, L is -L³-NH—, wherein each of L³ and R′ is independently as defined above and described herein.

[1181] In some embodiments, L³ is an optionally substituted C₅ alkylene or alkenylene, wherein one or more methylene units are optionally and independently replaced by —O—, —S—, —N(R′)—, —C(O)—, —C(S)—, —C(NR′)—, —S(O)—, —S(O)₂—, or

[chemical structure]

and each of R′ and Ring Cy′ is independently as defined above and described herein. In some embodiments, L³ is an

[chemical structure]

optionally substituted C₅ alkylene. In some embodiments, -L³-G- is

[1182] In some embodiments, L³ is an optionally substituted C₄ alkylene or alkenylene, wherein one or more methylene units are optionally and independently replaced by —O—, —S—, —N(R′)—, —C(O)—, —C(S)—, —C(NR′)—, —S(O)—, —S(O)₂—, or

[chemical structure]

and each of R′ and Cy′ is independently as defined above and described herein.

[1183] In some embodiments, -L³-G- is

[chemical structure]

[1184] In some embodiments, L³ is an optionally substituted C₃ alkylene or alkenylene, wherein one or more methylene units are optionally and independently replaced by —O—, —S—, —N(R′)—, —C(O)—, —C(S)—, —C(NR′)—, —S(O)—, —S(O)₂—, or,

[chemical structure]

and each of R′ and Cy′ is independently as defined above and described herein.

[1185] In some embodiments, -L³-G- is

[chemical structure]

[1186] In some embodiments, L is

[chemical structure]

[1187] In some embodiments, L is

[chemical structure]

In some embodiments, L is

[chemical structure]

[1188] In some embodiments, L³ is an optionally substituted C₂ alkylene or alkenylene, wherein one or more methylene units are optionally and independently replaced by —O—, —S—, —N(R′)—, —C(O)—, —C(S)—, —C(NR′)—, —S(O)—, —S(O)₂—, or

[chemical structure]

and each of R′ and Cy′ is independently as defined above and described herein.

[1189] In some embodiments, -L³-G- is

[chemical structure]

wherein each of G and Cy′ is independently as defined above and described herein. In some embodiments, L is

[chemical structure]

[1190] In some embodiments, L is -L⁴-G-, wherein L⁴ is an optionally substituted C₁-C₂ alkylene; and G is as defined above and described herein. In some embodiments, L is -L⁴-G-, wherein L⁴ is an optionally substituted C₁-C₂ alkylene; G is as defined above and described herein; and G is connected to R¹. In some embodiments, L is -L⁴-G-, wherein L⁴ is an optionally substituted methylene; G is as defined above and described herein; and G is connected to R¹. In some embodiments, L is -L⁴-G-, wherein L⁴ is methylene; G is as defined above and described herein; and G is connected to R¹. In some embodiments, L is -L⁴-G-, wherein L⁴ is an optionally substituted —(CH₂)₂—; G is as defined above and described herein; and G is connected to R¹. In some embodiments, L is -L⁴-G-, wherein L⁴ is —(CH₂)₂—; G is as defined above and described herein; and G is connected to R¹.

[1191] In some embodiments, L is

[chemical structure]

wherein G is as defined above and described herein, and G is connected to R¹. In some embodiments, L

[chemical structure]

wherein G is as defined above and described herein, and G is connected to R¹. In some embodiments, L is

[chemical structure]

wherein G is as defined above and described herein, and G is connected to R¹. In some embodiments, L is

[chemical structure]

wherein the sulfur atom is connected to R¹. In some embodiments, L is

[chemical structure]

wherein the oxygen atom is connected to R¹.

[1192] In some embodiments, L is

[chemical structure]

wherein G is as defined above and described herein.

[1193] In some embodiments, L is —S—R^{L3}— or —S—C(O)—R^{L3}—, wherein R^{L3} is an optionally substituted, linear or branched, C₁-C₉ alkylene, wherein one or more methylene units are optionally and independently replaced by an optionally substituted C₁-C₆ alkylene, C₁-C₆ alkenylene, —C≡C—, —C(R′)₂—, -Cy-, —O—, —S—, —S—S—, —N(R′)—, —C(O)—, —C(S)—, —C(NR′)—, —C(O)N(R′)—, —N(R′)C(O)N(R′)—, —N(R′)C(O)—, —N(R′)C(O)O—, —OC(O)N(R′)—, —S(O)—, —S(O)₂—, —S(O)₂N(R′)—, —N(R′)S(O)₂—, —SC(O)—, —C(O)S—, —OC(O)—, or —C(O)O—, wherein each of R′ and -Cy- is independently as defined above and described herein. In some embodiments, L is —S—R^{L3}— or —S—C(O)—R^{L3}—, wherein R^{L3} is an optionally substituted C₁-C₆ alkylene. In some embodiments, L is —S—R^{L3}— or —S—C(O)—R^{L3}—, wherein R^{L3} is an optionally substituted C₁-C₆ alkenylene. In some embodiments, L is —S—R^{L3}— or —S—C(O)—R^{L3}—, wherein R^{L3} is an optionally substituted C₁-C₆ alkylene wherein one or more methylene units are optionally and independently replaced by an optionally substituted C₁-C₆ alkenylene, arylene, or heteroarylene. In some embodiments, In some embodiments, R^{L3} is an optionally substituted —S—(C₁-C₆ alkenylene)-, —S—(C₁-C₆ alkylene)-, —S—(C₁-C₆ alkylene)-arylene-(C₁-C₆ alkylene)-, —S—CO-arylene-(C₁-C₆ alkylene)-, or —S—CO—(C₁-C₆ alkylene)-arylene-(C₁-C₆ alkylene)-.

[1194] In some embodiments, L is S

[chemical structure]

[1195] In some embodiments, L is

[chemical structure]

In some embodiments, L is

[chemical structure]

In some embodiments,

[chemical structure]

[1196] In some embodiments, the sulfur atom in the L embodiments described above and herein is connected to X. In some embodiments, the sulfur atom in the L embodiments described above and herein is connected to R¹.

[1197] In some embodiments, R¹ is halogen, R, or an optionally substituted C₁-C₅₀ aliphatic wherein one or more methylene units are optionally and independently replaced by an optionally substituted C₁-C₆ alkylene, C₁-C₆ alkenylene, —C≡C—, —C(R′)₂—, -Cy-, —O—, —S—, —S—S—, —N(R′)—, —C(O)—, —C(S)—, —C(NR′)—, —C(O)N(R′)—, —N(R′)C(O)N(R′)—, —N(R′)C(O)—, —N(R′)C(O)O—, —OC(O)N(R′)—, —S(O)—, —S(O)₂—, —S(O)₂N(R′)—, —N(R′)S(O)₂—, —SC(O)—, —C(O)S—, —OC(O)—, or —C(O)O—, wherein each variable is independently as defined above and described herein. In some embodiments, R¹ is halogen, R, or an optionally substituted C₁-C₁₀ aliphatic wherein one or more methylene units are optionally and independently replaced by an optionally substituted C₁-C₆ alkylene, C₁-C₆ alkenylene, —C≡C—, —C(R′)₂—, -Cy-, —O—, —S—, —S—S—, —N(R′)—, —C(O)—, —C(S)—, —C(NR′)—, —C(O)N(R′)—, —N(R′)C(O)N(R′)—, —N(R′)C(O)—, —N(R′)C(O)O—, —OC(O)N(R′)—, —S(O)—, —S(O)₂—, —S(O)₂N(R′)—, —N(R′)S(O)₂—, —SC(O)—, —C(O)S—, —OC(O)—, or —C(O)O—, wherein each variable is independently as defined above and described herein.

[1198] In some embodiments, R¹ is hydrogen. In some embodiments, R¹ is halogen. In some embodiments, R¹ is —F. In some embodiments, R¹ is —Cl. In some embodiments, R¹ is —Br. In some embodiments, R¹ is —I.

[1199] In some embodiments, R¹ is R wherein R is as defined above and described herein.

[1200] In some embodiments, R¹ is hydrogen. In some embodiments, R¹ is an optionally substituted group selected from C₁-C₅₀ aliphatic, phenyl, carbocyclyl, aryl, heteroaryl, or heterocyclyl.

[1201] In some embodiments, R¹ is an optionally substituted C₁-C₅₀ aliphatic. In some embodiments, R¹ is an optionally substituted C₁-C₁₀ aliphatic. In some embodiments, R¹ is an optionally substituted C₁-C₆ aliphatic. In some embodiments, R¹ is an optionally substituted C₁-C₆ alkyl. In some embodiments, R¹ is optionally substituted, linear or branched hexyl. In some embodiments, R¹ is optionally substituted, linear or branched pentyl. In some embodiments, R¹ is optionally substituted, linear or branched butyl. In some embodiments, R¹ is optionally substituted, linear or branched propyl. In some embodiments, R¹ is optionally substituted ethyl. In some embodiments, R¹ is optionally substituted methyl.

[1202] In some embodiments, R¹ is optionally substituted phenyl. In some embodiments, R¹ is substituted phenyl. In some embodiments, R¹ is phenyl.

[1203] In some embodiments, R¹ is optionally substituted carbocyclyl. In some embodiments, R¹ is optionally substituted C₃-C₁₀ carbocyclyl. In some embodiments, R¹ is optionally substituted monocyclic carbocyclyl. In some embodiments, R¹ is optionally substituted cycloheptyl. In some embodiments, R¹ is optionally substituted cyclohexyl. In some embodiments, R¹ is optionally substituted cyclopentyl. In some embodiments, R¹ is optionally substituted cyclobutyl. In some embodiments, R¹ is an optionally substituted cyclopropyl. In some embodiments, R¹ is optionally substituted bicyclic carbocyclyl.

[1204] In some embodiments, R¹ is an optionally substituted C₁-C₅₀ polycyclic hydrocarbon. In some embodiments, R¹ is an optionally substituted C₁-C₅₀ polycyclic hydrocarbon wherein one or more methylene units are optionally and independently replaced by an optionally substituted C₁-C₆ alkylene, C₁-C₆ alkenylene, —C≡C—, —C(R′)₂—, -Cy-, —O—, —S—, —S—S—, —N(R′)—, —C(O)—, —C(S)—, —C(NR′)—, —C(O)N(R′)—, —N(R′)C(O)N(R′)—, —N(R′)C(O)—, —N(R′)C(O)O—, —OC(O)N(R′)—, —S(O)—, —S(O)₂—, —S(O)₂N(R′)—, —N(R′)S(O)₂—, —SC(O)—, —C(O)S—, —OC(O)—, or —C(O)O—, wherein each variable is independently as defined above and described herein. In some embodiments, R¹ is optionally substituted

[chemical structure]

In some embodiments, R¹ is

[chemical structure]

In some embodiments, R¹ is optionally substituted

[chemical structure]

[1205] In some embodiments, R¹ is an optionally substituted C₁-C₅₀ aliphatic comprising one or more optionally substituted polycyclic hydrocarbon moieties. In some embodiments, R¹ is an optionally substituted C₁-C₅₀ aliphatic comprising one or more optionally substituted polycyclic hydrocarbon moieties, wherein one or more methylene units are optionally and independently replaced by an optionally substituted C₁-C₆ alkylene, C₁-C₆ alkenylene, —C≡C—, —C(R′)₂—, -Cy-, —O—, —S—, —S—S—, —N(R′)—, —C(O)—, —C(S)—, —C(NR′)—, —C(O)N(R′)—, —N(R′)C(O)N(R′)—, —N(R′)C(O)—, —N(R′)C(O)O—, —OC(O)N(R′)—, —S(O)—, —S(O)₂—, —S(O)₂N(R′)—, —N(R′)S(O)₂—, —SC(O)—, —C(O)S—, —OC(O)—, or —C(O)O—, wherein each variable is independently as defined above and described herein. In some embodiments, R¹ is an optionally substituted C₁-C₅₀ aliphatic comprising one or more optionally substituted

[chemical structure]

In some embodiments, R¹ is

[chemical structure]

In some embodiments, R¹ is

[chemical structure]

In some embodiments, R¹ is

[chemical structure]

In some embodiments, R¹ is

[chemical structure]

In some embodiments, R¹ is

[chemical structure]

[1206] In some embodiments, R¹ is an optionally substituted aryl. In some embodiments, R¹ is an optionally substituted bicyclic aryl ring.

[1207] In some embodiments, R¹ is an optionally substituted heteroaryl. In some embodiments, R¹ is an optionally substituted 5-6 membered monocyclic heteroaryl ring having 1-3 heteroatoms independently selected from nitrogen, sulfur, or oxygen. In some embodiments, R¹ is a substituted 5-6 membered monocyclic heteroaryl ring having 1-3 heteroatoms independently selected from nitrogen, oxygen, or sulfur. In some embodiments, R¹ is an unsubstituted 5-6 membered monocyclic heteroaryl ring having 1-3 heteroatoms independently selected from nitrogen, sulfur, or oxygen.

[1208] In some embodiments, R¹ is an optionally substituted 5 membered monocyclic heteroaryl ring having 1-3 heteroatoms independently selected from nitrogen, oxygen or sulfur. In some embodiments, R¹ is an optionally substituted 6 membered monocyclic heteroaryl ring having 1-3 heteroatoms independently selected from nitrogen, oxygen, or sulfur.

[1209] In some embodiments, R¹ is an optionally substituted 5-membered monocyclic heteroaryl ring having 1 heteroatom selected from nitrogen, oxygen, or sulfur. In some embodiments, R¹ is selected from pyrrolyl, furanyl, or thienyl.

[1210] In some embodiments, R¹ is an optionally substituted 5-membered heteroaryl ring having 2 heteroatoms independently selected from nitrogen, oxygen, or sulfur. In certain embodiments, R¹ is an optionally substituted 5-membered heteroaryl ring having 1 nitrogen atom, and an additional heteroatom selected from sulfur or oxygen. Example R¹ groups include optionally substituted pyrazolyl, imidazolyl, thiazolyl, isothiazolyl, oxazolyl or isoxazolyl.

[1211] In some embodiments, R¹ is a 6-membered heteroaryl ring having 1-3 nitrogen atoms. In other embodiments, R¹ is an optionally substituted 6-membered heteroaryl ring having 1-2 nitrogen atoms. In some embodiments, R¹ is an optionally substituted 6-membered heteroaryl ring having 2 nitrogen atoms. In certain embodiments, R¹ is an optionally substituted 6-membered heteroaryl ring having 1 nitrogen. Example R¹ groups include optionally substituted pyridinyl, pyrimidinyl, pyrazinyl, pyridazinyl, triazinyl, or tetrazinyl.

[1212] In certain embodiments, R¹ is an optionally substituted 8-10 membered bicyclic heteroaryl ring having 1-4 heteroatoms independently selected from nitrogen, oxygen, or sulfur. In some embodiments, R¹ is an optionally substituted 5,6-fused heteroaryl ring having 1-4 heteroatoms independently selected from nitrogen, oxygen, or sulfur. In other embodiments, R¹ is an optionally substituted 5,6-fused heteroaryl ring having 1-2 heteroatoms independently selected from nitrogen, oxygen, or sulfur. In certain embodiments, R¹ is an optionally substituted 5,6-fused heteroaryl ring having 1 heteroatom independently selected from nitrogen, oxygen, or sulfur. In some embodiments, R¹ is an optionally substituted indolyl. In some embodiments, R¹ is an optionally substituted azabicyclo[3.2.1]octanyl. In certain embodiments, R¹ is an optionally substituted 5,6-fused heteroaryl ring having 2 heteroatoms independently selected from nitrogen, oxygen, or sulfur. In some embodiments, R¹ is an optionally substituted azaindolyl. In some embodiments, R¹ is an optionally substituted benzimidazolyl. In some embodiments, R¹ is an optionally substituted benzothiazolyl. In some embodiments, R¹ is an optionally substituted benzoxazolyl. In some embodiments, R¹ is an optionally substituted indazolyl. In certain embodiments, R¹ is an optionally substituted 5,6-fused heteroaryl ring having 3 heteroatoms independently selected from nitrogen, oxygen, or sulfur.

[1213] In certain embodiments, R¹ is an optionally substituted 6,6-fused heteroaryl ring having 1-4 heteroatoms independently selected from nitrogen, oxygen, or sulfur. In some embodiments, R¹ is an optionally substituted 6,6-fused heteroaryl ring having 1-2 heteroatoms independently selected from nitrogen, oxygen, or sulfur. In other embodiments, R¹ is an optionally substituted 6,6-fused heteroaryl ring having 1 heteroatom independently selected from nitrogen, oxygen, or sulfur. In some embodiments, R¹ is an optionally substituted quinolinyl. In some embodiments, R¹ is an optionally substituted isoquinolinyl. According to one aspect, R¹ is an optionally substituted 6,6-fused heteroaryl ring having 2 heteroatoms independently selected from nitrogen, oxygen, or sulfur. In some embodiments, R¹ is a quinazoline or a quinoxaline.

[1214] In some embodiments, R¹ is an optionally substituted heterocyclyl. In some embodiments, R¹ is an optionally substituted 3-7 membered saturated or partially unsaturated heterocyclic ring having 1-2 heteroatoms independently selected from nitrogen, oxygen, or sulfur. In some embodiments, R¹ is a substituted 3-7 membered saturated or partially unsaturated heterocyclic ring having 1-2 heteroatoms independently selected from nitrogen, oxygen, or sulfur. In some embodiments, R¹ is an unsubstituted 3-7 membered saturated or partially unsaturated heterocyclic ring having 1-2 heteroatoms independently selected from nitrogen, oxygen, or sulfur.

[1215] In some embodiments, R¹ is an optionally substituted heterocyclyl. In some embodiments, R¹ is an optionally substituted 6 membered saturated or partially unsaturated heterocyclic ring having 1-2 heteroatoms independently selected from nitrogen, oxygen, or sulfur. In some embodiments, R¹ is an optionally substituted 6 membered partially unsaturated heterocyclic ring having 2 heteroatoms independently selected from nitrogen, oxygen, or sulfur. In some embodiments, R¹ is an optionally substituted 6 membered partially unsaturated heterocyclic ring having 2 oxygen atoms.

[1216] In certain embodiments, R¹ is a 3-7 membered saturated or partially unsaturated heterocyclic ring having 1-2 heteroatoms independently selected from nitrogen, oxygen, or sulfur. In certain embodiments, R¹ is oxiranyl, oxetanyl, tetrahydrofuranyl, tetrahydropyranyl, oxepaneyl, aziridineyl, azetidineyl, pyrrolidinyl, piperidinyl, azepanyl, thiiranyl, thietanyl, tetrahydrothiophenyl, tetrahydrothiopyranyl, thiepanyl, dioxolanyl, oxathiolanyl, oxazolidinyl, imidazolidinyl, thiazolidinyl, dithiolanyl, dioxanyl, morpholinyl, oxathianyl, piperazinyl, thiomorpholinyl, dithianyl, dioxepanyl, oxazepanyl, oxathiepanyl, dithiepanyl, diazepanyl, dihydrofuranonyl, tetrahydropyranonyl, oxepanonyl, pyrolidinonyl, piperidinonyl, azepanonyl, dihydrothiophenonyl, tetrahydrothiopyranonyl, thiepanonyl, oxazolidinonyl, oxazinanonyl, oxazepanonyl, dioxolanonyl, dioxanonyl, dioxepanonyl, oxathiolinonyl, oxathianonyl, oxathiepanonyl, thiazolidinonyl, thiazinanonyl, thiazepanonyl, imidazolidinonyl, tetrahydropyrimidinonyl, diazepanonyl, imidazolidinedionyl, oxazolidinedionyl, thiazolidinedionyl, dioxolanedionyl, oxathiolanedionyl, piperazinedionyl, morpholinedionyl, thiomorpholinedionyl, tetrahydropyranyl, tetrahydrofuranyl, morpholinyl, thiomorpholinyl, piperidinyl, piperazinyl, pyrrolidinyl, tetrahydrothiophenyl, or tetrahydrothiopyranyl. In some embodiments, R¹ is an optionally substituted 5 membered saturated or partially unsaturated heterocyclic ring having 1-2 heteroatoms independently selected from nitrogen, oxygen, or sulfur.

[1217] In certain embodiments, R¹ is an optionally substituted 5-6 membered partially unsaturated monocyclic ring having 1-2 heteroatoms independently selected from nitrogen, oxygen, or sulfur. In certain embodiments, R¹ is an optionally substituted tetrahydropyridinyl, dihydrothiazolyl, dihydrooxazolyl, or oxazolinyl group.

[1218] In some embodiments, R¹ is an optionally substituted 8-10 membered bicyclic saturated or partially unsaturated heterocyclic ring having 1-4 heteroatoms independently selected from nitrogen, oxygen, or sulfur. In some embodiments, R¹ is an optionally substituted indolinyl. In some embodiments, R¹ is an optionally substituted isoindolinyl. In some embodiments, R¹ is an optionally substituted 1, 2, 3, 4-tetrahydroquinoline. In some embodiments, R¹ is an optionally substituted 1, 2, 3, 4-tetrahydroisoquinoline.

[1219] In some embodiments, R¹ is an optionally substituted C₁-C₁₀ aliphatic wherein one or more methylene units are optionally and independently replaced by an optionally substituted C₁-C₆ alkylene, C₁-C₆ alkenylene, —C≡C≡, —C(R′)₂—, -Cy-, —O—, —S—, —S—S—, —N(R′)—, —C(O)—, —C(S)—, —C(NR′)—, —C(O)N(R′)—, —N(R′)C(O)N(R′)—, —N(R′)C(O)—, —N(R′)C(O)O—, —OC(O)N(R′)—, —S(O)—, —S(O)₂—, —S(O)₂N(R′)—, —N(R′)S(O)₂—, —SC(O)—, —C(O)S—, —OC(O)—, or —C(O)O—, wherein each variable is independently as defined above and described herein. In some embodiments, R¹ is an optionally substituted C₁-C₁₀ aliphatic wherein one or more methylene units are optionally and independently replaced by an optionally-Cy-, —O—, —S—, —S—S—, —N(R′)—, —C(O)—, —C(S)—, —C(NR′)—, —C(O)N(R′)—, —N(R′)C(O)N(R′)—, —N(R′)C(O)—, —N(R′)C(O)O—, —OC(O)N(R′)—, —S(O)—, —S(O)₂—, —S(O)₂N(R′)—, —N(R′)S(O)₂—, —OC(O)—, or —C(O)O—, wherein each R′ is independently as defined above and described herein. In some embodiments, R¹ is an optionally substituted C₁-C₁₀ aliphatic wherein one or more methylene units are optionally and independently replaced by an optionally-Cy-, —O—, —S—, —S—S—, —N(R′)—, —C(O)—, —OC(O)—, or —C(O)O—, wherein each R′ is independently as defined above and described herein.

[1220] In some embodiments, R¹ is

[chemical structure]

[chemical structure]

[chemical structure]

[chemical structure]

[chemical structure]

[1221] In some embodiments, R¹ is CH₃—,

[chemical structure]

[1222] In some embodiments, R¹ comprises a terminal optionally substituted —(CH₂)₂-moiety which is connected to L. Example such R¹ groups are depicted below:

[chemical structure]

[1223] In some embodiments, R¹ comprises a terminal optionally substituted —(CH₂)— moiety which is connected to L. Exemplary such R¹ groups are depicted below:

[chemical structure]

[1224] In some embodiments, R¹ is —S—R^{L2}, wherein R^{L2} is an optionally substituted C₁-C₉ aliphatic wherein one or more methylene units are optionally and independently replaced by an optionally substituted C₁-C₆ alkylene, C₁-C₆ alkenylene, —C≡C—, —C(R′)₂—, -Cy-, —O—, —S—, —S—S—, —N(R′)—, —C(O)—, —C(S)—, —C(NR′)—, —C(O)N(R′)—, —N(R′)C(O)N(R′)—, —N(R′)C(O)—, —N(R′)C(O)O—, —OC(O)N(R′)—, —S(O)—, —S(O)₂—, —S(O)₂N(R′)—, —N(R′)S(O)₂—, —SC(O)—, —C(O)S—, —OC(O)—, or —C(O)O—, and each of R′ and -Cy- is independently as defined above and described herein. In some embodiments, R¹ is —S—R^{L2}, wherein the sulfur atom is connected with the sulfur atom in L group.

[1225] In some embodiments, R¹ is —C(O)—R^{L2}, wherein R^{L2} is an optionally substituted C₁-C₉ aliphatic wherein one or more methylene units are optionally and independently replaced by an optionally substituted C₁-C₆ alkylene, C₁-C₆ alkenylene, —C≡C—, —C(R′)₂—, -Cy-, —O—, —S—, —S—S—, —N(R′)—, —C(O)—, —C(S)—, —C(NR′)—, —C(O)N(R′)—, —N(R′)C(O)N(R′)—, —N(R′)C(O)—, —N(R′)C(O)O—, —OC(O)N(R′)—, —S(O)—, —S(O)₂—, —S(O)₂N(R′)—, —N(R′)S(O)₂—, —SC(O)—, —C(O)S—, —OC(O)—, or —C(O)O—, and each of R′ and -Cy- is independently as defined above and described herein. In some embodiments, R¹ is —C(O)—R^{L2}, wherein the carbonyl group is connected with G in L group. In some embodiments, R¹ is —C(O)—R^{L2}, wherein the carbonyl group is connected with the sulfur atom in L group.

[1226] In some embodiments, R^{L2} is optionally substituted C₁-C₉ aliphatic. In some embodiments, R^{L2} is optionally substituted C₁-C₉ alkyl. In some embodiments, R^{L2} is optionally substituted C₁-C₉ alkenyl. In some embodiments, R^{L2} is optionally substituted C₁-C₉ alkynyl. In some embodiments, R^{L2} is an optionally substituted C₁-C₉ aliphatic wherein one or more methylene units are optionally and independently replaced by -Cy- or —C(O)—. In some embodiments, R^{L2} is an optionally substituted C₁-C₉ aliphatic wherein one or more methylene units are optionally and independently replaced by -Cy-. In some embodiments, R^{L2} is an optionally substituted C₁-C₉ aliphatic wherein one or more methylene units are optionally and independently replaced by an optionally substituted heterocycylene. In some embodiments, R^{L2} is an optionally substituted C₁-C₉ aliphatic wherein one or more methylene units are optionally and independently replaced by an optionally substituted arylene. In some embodiments, R^{L2} is an optionally substituted C₁-C₉ aliphatic wherein one or more methylene units are optionally and independently replaced by an optionally substituted heteroarylene. In some embodiments, R^{L2} is an optionally substituted C₁-C₉ aliphatic wherein one or more methylene units are optionally and independently replaced by an optionally substituted C₃-C₁₀ carbocyclylene. In some embodiments, R^{L2} is an optionally substituted C₁-C₉ aliphatic wherein two methylene units are optionally and independently replaced by -Cy- or —C(O)—. In some embodiments, R^{L2} is an optionally substituted C₁-C₉ aliphatic wherein two methylene units are optionally and independently replaced by -Cy- or —C(O)—. Example R^{L2} groups are depicted below:

[chemical structure]

[1227] In some embodiments, R¹ is hydrogen, or an optionally substituted group selected from

[chemical structure]

—S—(C₁-C₁₀ aliphatic), C₁-C₁₀ aliphatic, aryl, C₁-C₆ heteroalkyl, heteroaryl and heterocyclyl. In some embodiments, R¹ is

[chemical structure]

or —S—(C₁-C₁₀ aliphatic). In some embodiments, R¹ is

[chemical structure]

[1228] In some embodiments, R¹ is an optionally substituted group selected from —S—(C₁-C₆ aliphatic), C₁-C₁₀ aliphatic, C₁-C₆ heteroaliphatic, aryl, heterocyclyl and heteroaryl.

[1229] In some embodiments, R¹ is

[chemical structure]

[1230] In some embodiments, the sulfur atom in the R¹ embodiments described above and herein is connected with the sulfur atom, G, E, or —C(O)— moiety in the L embodiments described above and herein. In some embodiments, the —C(O)— moiety in the R¹ embodiments described above and herein is connected with the sulfur atom, G, E, or —C(O)— moiety in the L embodiments described above and herein.

[1231] In some embodiments, -L-R¹ is any combination of the L embodiments and R¹ embodiments described above and herein.

[1232] In some embodiments, -L-R¹ is -L³-G-R¹ wherein each variable is independently as defined above and described herein.

[1233] In some embodiments, -L-R¹ is -L⁴-G-R¹ wherein each variable is independently as defined above and described herein.

[1234] In some embodiments, -L-R¹ is -L³-G-S—R^{L2}, wherein each variable is independently as defined above and described herein.

[1235] In some embodiments, -L-R¹ is -L³-G-C(O)—R^{L2}, wherein each variable is independently as defined above and described herein.

[1236] In some embodiments, -L-R¹ is

[chemical structure]

wherein R^{L2} is an optionally substituted C₁-C₉ aliphatic wherein one or more methylene units are optionally and independently replaced by an optionally substituted C₁-C₆ alkylene, C₁-C₆ alkenylene, —C≡C—, —C(R′)₂—, -Cy-, —O—, —S—, —S—S—, —N(R′)—, —C(O)—, —C(S)—, —C(NR′)—, —C(O)N(R′)—, —N(R′)C(O)N(R′)—, —N(R′)C(O)—, —N(R′)C(O)O—, —OC(O)N(R′)—, —S(O)—, —S(O)₂—, —S(O)₂N(R′)—, —N(R′)S(O)₂—, —SC(O)—, —C(O)S—, —OC(O)—, or —C(O)O—, and each G is independently as defined above and described herein.

[1237] In some embodiments, -L-R¹ is —R^{L3}—S—S—R^{L2}, wherein each variable is independently as defined above and described herein. In some embodiments, -L-R¹ is —R^{L3}—C(O)—S—S—R^{L2}, wherein each variable is independently as defined above and described herein.

[1238] In some embodiments, -L-R¹ has the structure of:

[chemical structure]

wherein each variable is independently as defined above and described herein.

[1239] In some embodiments, -L-R¹ has the structure of:

[chemical structure]

wherein each variable is independently as defined above and described herein.

[1240] In some embodiments, -L-R¹ has the structure of:

[chemical structure]

wherein each variable is independently as defined above and described herein.

[1241] In some embodiments, -L-R¹ has the structure of:

[chemical structure]

wherein each variable is independently as defined above and described herein.

[1242] In some embodiments, -L-R¹ has the structure of:

[chemical structure]

wherein each variable is independently as defined above and described herein.

[1243] In some embodiments, -L-R¹ has the structure of:

[chemical structure]

wherein each variable is independently as defined above and described herein.

[1244] In some embodiments, -L-R¹ has the structure of:

[chemical structure]

wherein each variable is independently as defined above and described herein.

[1245] In some embodiments, -L-R¹ has the structure of:

[chemical structure]

wherein each variable is independently as defined above and described herein.

[1246] In some embodiments, -L-R¹ has the structure of:

[chemical structure]

wherein each variable is independently as defined above and described herein.

[1247] In some embodiments, -L-R¹ has the structure of:

[chemical structure]

wherein each variable is independently as defined above and described herein.

[1248] In some embodiments, -L-R¹ has the structure of:

[chemical structure]

wherein each variable is independently as defined above and described herein.

[1249] In some embodiments, -L-R¹ has the structure of:

[chemical structure]

wherein each variable is independently as defined above and described herein.

[1250] In some embodiments, -L-R¹ has the structure of:

[chemical structure]

wherein each variable is independently as defined above and described herein.

[1251] In some embodiments, -L-R¹ has the structure of:

[chemical structure]

wherein each variable is independently as defined above and described herein.

[1252] In some embodiments, -L-R¹ has the structure of:

[chemical structure]

wherein each variable is independently as defined above and described herein.

[1253] In some embodiments, -L-R¹ has the structure of:

[chemical structure]

wherein each variable is independently as defined above and described herein.

[1254] In some embodiments, -L-R¹ has the structure of:

[chemical structure]

wherein each variable is independently as defined above and described herein.

[1255] In some embodiments, -L-R¹ has the structure of:

[chemical structure]

wherein each variable is independently as defined above and described herein.

[1256] In some embodiments, -L-R¹ has the structure of:

[chemical structure]

wherein each variable is independently as defined above and described herein.

[1257] In some embodiments, -L-R¹ has the structure of:

[chemical structure]

wherein each variable is independently as defined above and described herein.

[1258] In some embodiments, -L-R¹ has the structure of:

[chemical structure]

wherein each variable is independently as defined above and described herein.

[1259] In some embodiments, L has the structure of:

[chemical structure]

wherein each variable is independently as defined above and described herein.

[1260] In some embodiments, —X-L-R¹ has the structure of:

[chemical structure]

wherein:
the phenyl ring is optionally substituted, and
each of R¹ and X is independently as defined above and described herein.

[1261] In some embodiments, -L-R¹ is

[chemical structure]

[chemical structure]

[chemical structure]

[chemical structure]

[chemical structure]

[1262] In some embodiments, -L-R¹ is:

[chemical structure]

[1263] In some embodiments, -L-R¹ is CH₃—,

[chemical structure]

In some embodiments, -L-R¹ is

[chemical structure]

[1264] In some embodiments, -L-R¹ comprises a terminal optionally substituted —(CH₂)₂— moiety which is connected to X. In some embodiments, -L-R¹ comprises a terminal —(CH₂)₂— moiety which is connected to X. Example such -L-R¹ moieties are depicted below:

[chemical structure]

[1265] In some embodiments, -L-R¹ comprises a terminal optionally substituted —(CH₂)— moiety which is connected to X. In some embodiments, -L-R¹ comprises a terminal —(CH₂)— moiety which is connected to X. Example such -L-R¹ moieties are depicted below:

[chemical structure]

[1266] In some embodiments, -L-R¹ is

[chemical structure]

[1267] In some embodiments, -L-R¹ is CH₃—,

[chemical structure]

### and X is —S—.

[1268] In some embodiments, -L-R¹ is CH₃—,

[chemical structure]

### X is —S—, W is O, Y is —O—, and Z is —O—.

[1269] In some embodiments, R¹ is

[chemical structure]

or —S—(C₁-C₁₀ aliphatic).

[1270] In some embodiments, R¹ is

[chemical structure]

[1271] In some embodiments, X is —O— or —S—, and R¹ is

[chemical structure]

or —S—(C₁-C₁₀ aliphatic).

[1272] In some embodiments, X is —O— or —S—, and R¹ is

[chemical structure]

—S—(C₁-C₁₀ aliphatic) or —S—(C₁-C₅₀ aliphatic).

[1273] In some embodiments, L is a covalent bond and -L-R¹ is R¹.

[1274] In some embodiments, -L-R¹ is not hydrogen.

[1275] In some embodiments, —X-L-R¹ is R¹ is

[chemical structure]

—S—(C₁-C₁₀ aliphatic) or —S—(C₁-C₅₀ aliphatic).

[1276] In some embodiments, —X-L-R¹ has the structure of

[chemical structure]

wherein the

[chemical structure]

moiety is optionally substituted. In some embodiments, —X-L-R¹ is

[chemical structure]

In some embodiments, —X-L-R¹ is

[chemical structure]

In some embodiments, —X-L-R¹ is

[chemical structure]

In some embodiments, —X-L-R¹ has the structure of

[chemical structure]

wherein X′ is O or S, Y′ is —O—, —S— or —NR′—, and the

[chemical structure]

moiety is optionally substituted. In some embodiments, Y′ is —O—, —S— or —NH—. In some embodiments,

[chemical structure]

In some embodiments,

[chemical structure]

In some embodiments,

[chemical structure]

is

[chemical structure]

In some embodiments, —X-L-R¹ has the structure of

[chemical structure]

wherein X′ is O or S, and the

[chemical structure]

moiety is optionally substituted. In some embodiments,

[chemical structure]

is

[chemical structure]

In some embodiments, —X-L-R¹ is

[chemical structure]

wherein the

[chemical structure]

is optionally substituted. In some embodiments —X-L-R¹ is

[chemical structure]

wherein the

[chemical structure]

is substituted. In some embodiments, —X-L-R¹ is

[chemical structure]

wherein the

[chemical structure]

is unsubstituted.

[1277] In some embodiments, —X-L-R¹ is R¹—C(O)—S-L^{x}-S—, wherein L^{x} is an optionally substituted group selected from

[chemical structure]

In some embodiments, L^{x} is

[chemical structure]

In some embodiments, —X-L-R¹ is (CH₃)₃C—S—S-L^{x}-S—. In some embodiments, —X-L-R¹ is R¹—C(═X′)—Y′—C(R)₂—S-L^{x}-S—. In some embodiments, —X-L-R¹ is R—C(═X′)—Y′—CH₂—S-L^{x}-S—. In some embodiments, —X-L-R¹ is

[chemical structure]

[1278] As will be appreciated by a person skilled in the art, many of the —X-L-R¹ groups described herein are cleavable and can be converted to —X— after administration to a subject. In some embodiments, —X-L-R¹ is cleavable. In some embodiments, —X-L-R¹ is —S-L-R¹, and is converted to —S— after administration to a subject. In some embodiments, the conversion is promoted by an enzyme of a subject. As appreciated by a person skilled in the art, methods of determining whether the —S-L-R¹ group is converted to —S— after administration is widely known and practiced in the art, including those used for studying drug metabolism and pharmacokinetics.

[1279] In some embodiments, the internucleotidic linkage having the structure of formula

[chemical structure]

[1280] In some embodiments, the internucleotidic linkage of formula I has the structure of formula I-a:

[chemical structure]

wherein each variable is independently as defined above and described herein.

[1281] In some embodiments, the internucleotidic linkage of formula I has the structure of formula I-b:

[chemical structure]

wherein each variable is independently as defined above and described herein.

[1282] In some embodiments, the internucleotidic linkage of formula I is an phosphorothioate triester linkage having the structure of formula I-c:

[chemical structure]

wherein:
[1283] P* is an asymmetric phosphorus atom and is either Rp or Sp;
[1284] L is a covalent bond or an optionally substituted, linear or branched C₁-C₁₀ alkylene, wherein one or more methylene units of L are optionally and independently replaced by an optionally substituted C₁-C₆ alkylene, C₁-C₆ alkenylene, —C≡C—, —C(R′)₂—, -Cy-, —O—, —S—, —S—S—, —N(R′)—, —C(O)—, —C(S)—, —C(NR′)—, —C(O)N(R′)—, —N(R′)C(O)N(R′)—, —N(R′)C(O)—, —N(R′)C(O)O—, —OC(O)N(R′)—, —S(O)—, —S(O)₂—, —S(O)₂N(R′)—, —N(R′)S(O)₂—, —SC(O)—, —C(O)S—, —OC(O)—, or —C(O)O—;
[1285] R¹ is halogen, R, or an optionally substituted C₁-C₅₀ aliphatic wherein one or more methylene units are optionally and independently replaced by an optionally substituted C₁-C₆ alkylene, C₁-C₆ alkenylene, —C≡C—, —C(R′)₂—, -Cy-, —O—, —S—, —S—S—, —N(R′)—, —C(O)—, —C(S)—, —C(NR′)—, —C(O)N(R′)—, —N(R′)C(O)N(R′)—, —N(R′)C(O)—, —N(R′)C(O)O—, —OC(O)N(R′)—, —S(O)—, —S(O)₂—, —S(O)₂N(R′)—, —N(R′)S(O)₂—, —SC(O)—, —C(O)S—, —OC(O)—, or —C(O)O—;
[1286] each R′ is independently —R, —C(O)R, —CO₂R, or —SO₂R, or:
   [1287] two R′ on the same nitrogen are taken together with their intervening atoms to form an optionally substituted heterocyclic or heteroaryl ring, or
   [1288] two R′ on the same carbon are taken together with their intervening atoms to form an optionally substituted aryl, carbocyclic, heterocyclic, or heteroaryl ring;
[1289] -Cy- is an optionally substituted bivalent ring selected from phenylene, carbocyclylene, arylene, heteroarylene, or heterocyclylene;
[1290] each R is independently hydrogen, or an optionally substituted group selected from C₁-C₆ aliphatic, phenyl, carbocyclyl, aryl, heteroaryl, or heterocyclyl;
[1291] each

[chemical structure]

independently represents a connection to a nucleoside; and R¹ is not —H when L is a covalent bond.

[1292] In some embodiments, the internucleotidic linkage having the structure of formula

[chemical structure]

[chemical structure]

[chemical structure]

[1293] In some embodiments, the internucleotidic linkage having the structure of formula

[chemical structure]

[chemical structure]

[chemical structure]

[1294] In some embodiments, the present disclosure provides a chirally controlled oligonucleotide comprising one or more phosphate diester linkages, and one or more modified internucleotide linkages having the formula of I-a, I-b, or I-c.

[1295] In some embodiments, a modified internucleotidic linkage has the structure of I. In some embodiments, a modified internucleotidic linkage has the structure of I-a. In some embodiments, a modified internucleotidic linkage has the structure of I-b. In some embodiments, a modified internucleotidic linkage has the structure of I-c.

[1296] In some embodiments, a modified internucleotidic linkage is phosphorothioate. Examples of internucleotidic linkages having the structure of formula I are widely known in the art, including but not limited to those described in US 20110294124, US 20120316224, US 20140194610, US 20150211006, US 20150197540, WO 2015107425, PCT/US2016/043542, and PCT/US2016/043598, each of which is incorporated herein by reference.

[1297] Non-limiting examples of internucleotidic linkages also include those described in the art, including, but not limited to, those described in any of: Gryaznov, S.; Chen, J.-K. J. Am. Chem. Soc. 1994, 116, 3143, Jones et al. J. Org. Chem. 1993, 58, 2983, Koshkin et al. 1998 Tetrahedron 54: 3607-3630, Lauritsen et al. 2002 Chem. Comm. 5: 530-531, Lauritsen et al. 2003 Bioo. Med. Chem. Lett. 13: 253-256, Mesmaeker et al. Angew. Chem., Int. Ed. Engl. 1994, 33, 226, Petersen et al. 2003 TRENDS Biotech. 21: 74-81, Schultz et al. 1996 Nucleic Acids Res. 24: 2966, Ts'o et al. Ann. N. Y. Acad. Sci. 1988, 507, 220, and Vasseur et al. J. Am. Chem. Soc. 1992, 114, 4006.

[1298] In some embodiments, provided oligonucleotides in provided compositions, e.g., oligonucleotides of a first plurality, comprise base modifications, sugar modifications, and/or internucleotidic linkage modifications, wherein one or more modifications is enrichment of deuterium. In some embodiments, e.g., an oligonucleotide is deuterated at one or more of its sugars, nucleobases, internucleotidic linkages, lipid moieties, linker moieties, targeting components, etc. Such oligonucleotides can be used in any composition or method described herein.

[1299] Oligonucleotides of the provided technologies can be of various lengths. In some embodiments, provided oligonucleotides comprise 5, 6, 7, 8, 9, 10, 11, 12, 13, 14, 15, 16, 17, 18, 19, 20, 21, 22, 23, 24, 25, 26, 27, 28, 29, 30, 40, 50 or more bases. In some embodiments, provided oligonucleotides comprise 10, 11, 12, 13, 14, 15, 16, 17, 18, 19, 20, 21, 22, 23, 24, 25, 26, 27, 28, 29, 30, 40, 50 or more bases. In some embodiments, provided oligonucleotides comprise 15, 16, 17, 18, 19, 20, 21, 22, 23, 24, 25, 26, 27, 28, 29, 30, 40, 50 or more bases. In some embodiments, provided oligonucleotides comprise 15 or more bases. In some embodiments, provided oligonucleotides comprise 16 or more bases. In some embodiments, provided oligonucleotides comprise 17 or more bases. In some embodiments, provided oligonucleotides comprise 18 or more bases. In some embodiments, provided oligonucleotides comprise 19 or more bases. In some embodiments, provided oligonucleotides comprise 20 or more bases. In some embodiments, provided oligonucleotides comprise 21 or more bases. In some embodiments, provided oligonucleotides comprise 22 or more bases. In some embodiments, provided oligonucleotides comprise 23 or more bases. In some embodiments, provided oligonucleotides comprise 24 or more bases. In some embodiments, provided oligonucleotides comprise 25 or more bases. In some embodiments, provided oligonucleotides comprise 26 or more bases. In some embodiments, provided oligonucleotides comprise 27 or more bases. In some embodiments, provided oligonucleotides comprise 28 or more bases. In some embodiments, provided oligonucleotides comprise 29 or more bases. In some embodiments, provided oligonucleotides comprise 30 or more bases. In some embodiments, provided oligonucleotides comprise 40 or more bases. In some embodiments, provided oligonucleotides comprise 50 or more bases. In some embodiments, provided oligonucleotides are 15mers. In some embodiments, provided oligonucleotides are 16mers. In some embodiments, provided oligonucleotides are 17mers. In some embodiments, provided oligonucleotides are 18mers. In some embodiments, provided oligonucleotides are 19mers. In some embodiments, provided oligonucleotides are 20mers. In some embodiments, provided oligonucleotides are 21 mers. In some embodiments, provided oligonucleotides are 22mers. In some embodiments, provided oligonucleotides are 23mers. In some embodiments, provided oligonucleotides are 24mers. In some embodiments, provided oligonucleotides are 25mers. In some embodiments, provided oligonucleotides are 26mers. In some embodiments, provided oligonucleotides are 27mers. In some embodiments, provided oligonucleotides are 28mers. In some embodiments, provided oligonucleotides are 29mers. In some embodiments, provided oligonucleotides are 30mers.

[1300] In some embodiments, the present disclosure provides a chirally controlled oligonucleotide comprising at least one phosphate diester internucleotidic linkage and at least one phosphorothioate triester linkage having the structure of formula I-c. In some embodiments, the present disclosure provides a chirally controlled oligonucleotide comprising at least one phosphate diester internucleotidic linkage and at least two phosphorothioate triester linkages having the structure of formula I-c. In some embodiments, the present disclosure provides a chirally controlled oligonucleotide comprising at least one phosphate diester internucleotidic linkage and at least three phosphorothioate triester linkages having the structure of formula I-c. In some embodiments, the present disclosure provides a chirally controlled oligonucleotide comprising at least one phosphate diester internucleotidic linkage and at least four phosphorothioate triester linkages having the structure of formula I-c. In some embodiments, the present disclosure provides a chirally controlled oligonucleotide comprising at least one phosphate diester internucleotidic linkage and at least five phosphorothioate triester linkages having the structure of formula I-c.

[1301] In some embodiments, a chirally controlled oligonucleotide is designed such that one or more nucleotides comprise a phosphorus modification prone to “autorelease” under certain conditions. That is, under certain conditions, a particular phosphorus modification is designed such that it self-cleaves from the oligonucleotide to provide, e.g., a phosphate diester such as those found in naturally occurring DNA and RNA. In some embodiments, such a phosphorus modification has a structure of —O-L-R¹, wherein each of L and R¹ is independently as defined above and described herein. In some embodiments, an autorelease group comprises a morpholino group. In some embodiments, an autorelease group is characterized by the ability to deliver an agent to the internucleotidic phosphorus linker, which agent facilitates further modification of the phosphorus atom such as, e.g., desulfurization. In some embodiments, the agent is water and the further modification is hydrolysis to form a phosphate diester as is found in naturally occurring DNA and RNA.

[1302] In some embodiments, a chirally controlled oligonucleotide is designed such that the resulting pharmaceutical properties are improved through one or more particular modifications at phosphorus. It is well documented in the art that certain oligonucleotides are rapidly degraded by nucleases and exhibit poor cellular uptake through the cytoplasmic cell membrane (Poijarvi-Virta et al., Curr. Med. Chem. (2006), 13(28); 3441-65; Wagner et al., Med. Res. Rev. (2000), 20(6):417-51; Peyrottes et al., Mini Rev. Med. Chem. (2004), 4(4):395-408; Gosselin et al., (1996), 43(1):196-208; Bologna et al., (2002), Antisense & Nucleic Acid Drug Development 12:33-41). For instance, Vives et al., (Nucleic Acids Research (1999), 27(20):4071-76) found that tert-butyl SATE pro-oligonucleotides displayed markedly increased cellular penetration compared to the parent oligonucleotide.

[1303] In some embodiments, a modification at a linkage phosphorus is characterized by its ability to be transformed to a phosphate diester, such as those present in naturally occurring DNA and RNA, by one or more esterases, nucleases, and/or cytochrome P450 enzymes, including but not limited to, those listed below:

| Family | Gene |
|---|---|
| CYP1 | CYP1A1, CYP1A2, CYP1B1 |
| CYP2 | CYP2A6, CYP2A7, CYP2A13, CYP2B6, |
| | CYP2C8, CYP2C9, CYP2C18, CYP2C19, |
| | CYP2D6, CYP2E1, CYP2F1, CYP2J2, |
| | CYP2R1, CYP2S1, CYP2U1, CYP2W1 |
| CYP3 | CYP3A4, CYP3A5, CYP3A7, CYP3A43 |
| CYP4 | CYP4A11, CYP4A22, CYP4B1, CYP4F2, |
| | CYP4F3, CYP4F8, CYP4F11, CYP4F12, |
| | CYP4F22, CYP4V2, CYP4X1, CYP4Z1 |
| CYP5 | CYP5A1 |
| CYP7 | CYP7A1, CYP7B1 |
| CYP8 | CYP8A1 (prostacyclin synthase), CYP8B1 |
| | (bile acid biosynthesis) |
| CYP11 | CYP11A1, CYP11B1, CYP11B2 |
| CYP17 | CYP17A1 |
| CYP19 | CYP19A1 |
| CYP20 | CYP20A1 |
| CYP21 | CYP21A2 |
| CYP24 | CYP24A1 |
| CYP26 | CYP26A1, CYP26B1, CYP26C1 |
| CYP27 | CYP27A1 (bile acid biosynthesis), CYP27B1 |
| | (vitamin D3 1-alpha hydroxylase, activates |
| | vitamin D3), CYP27C1 (unknown function) |
| CYP39 | CYP39A1 |
| CYP46 | CYP46A1 |
| CYP51 | CYP51A1 (lanosterol 14-alpha demethylase) |

[1304] In some embodiments, a modification at phosphorus results in a P-modification moiety characterized in that it acts as a pro-drug, e.g., the P-modification moiety facilitates delivery of an oligonucleotide to a desired location prior to removal. For instance, in some embodiments, a P-modification moiety results from PEGylation at the linkage phosphorus. One of skill in the relevant arts will appreciate that various PEG chain lengths are useful and that the selection of chain length will be determined in part by the result that is sought to be achieved by PEGylation. For instance, in some embodiments, PEGylation is effected in order to reduce RES uptake and extend in vivo circulation lifetime of an oligonucleotide.

[1305] In some embodiments, a PEGylation reagent for use in accordance with the present disclosure is of a molecular weight of about 300 g/mol to about 100,000 g/mol. In some embodiments, a PEGylation reagent is of a molecular weight of about 300 g/mol to about 10,000 g/mol. In some embodiments, a PEGylation reagent is of a molecular weight of about 300 g/mol to about 5,000 g/mol. In some embodiments, a PEGylation reagent is of a molecular weight of about 500 g/mol. In some embodiments, a PEGylation reagent of a molecular weight of about 1000 g/mol. In some embodiments, a PEGylation reagent is of a molecular weight of about 3000 g/mol. In some embodiments, a PEGylation reagent is of a molecular weight of about 5000 g/mol.

[1306] In certain embodiments, a PEGylation reagent is PEG500. In certain embodiments, a PEGylation reagent is PEG1000. In certain embodiments, a PEGylation reagent is PEG3000. In certain embodiments, a PEGylation reagent is PEG5000.

[1307] In some embodiments, a P-modification moiety is characterized in that it acts as a PK enhancer, e.g., lipids, PEGylated lipids, etc.

[1308] In some embodiments, a P-modification moiety is characterized in that it acts as an agent which promotes cell entry and/or endosomal escape, such as a membrane-disruptive lipid or peptide.

[1309] In some embodiments, a P-modification moiety is characterized in that it acts as a targeting agent. In some embodiments, a P-modification moiety is or comprises a targeting agent. The phrase “targeting agent,” as used herein, is an entity that is associates with a payload of interest (e.g., with an oligonucleotide or oligonucleotide composition) and also interacts with a target site of interest so that the payload of interest is targeted to the target site of interest when associated with the targeting agent to a materially greater extent than is observed under otherwise comparable conditions when the payload of interest is not associated with the targeting agent. A targeting agent may be, or comprise, any of a variety of chemical moieties, including, for example, small molecule moieties, nucleic acids, polypeptides, carbohydrates, etc. Targeting agents are described further by Adarsh et al., “Organelle Specific Targeted Drug Delivery—A Review,” International Journal of Research in Pharmaceutical and Biomedical Sciences, 2011, p. 895.

[1310] Example such targeting agents include, but are not limited to, proteins (e.g. Transferrin), oligopeptides (e.g., cyclic and acylic RGD-containing oligopedptides), antibodies (monoclonal and polyclonal antibodies, e.g. IgG, IgA, IgM, IgD, IgE antibodies), sugars/carbohydrates (e.g., monosaccharides and/or oligosaccharides (mannose, mannose-6-phosphate, galactose, and the like)), vitamins (e.g., folate), or other small biomolecules. In some embodiments, a targeting moiety is a steroid molecule (e.g., bile acids including cholic acid, deoxycholic acid, dehydrocholic acid; cortisone; digoxigenin; testosterone; cholesterol; cationic steroids such as cortisone having a trimethylaminomethyl hydrazide group attached via a double bond at the 3-position of the cortisone ring, etc.). In some embodiments, a targeting moiety is a lipophilic molecule (e.g., alicyclic hydrocarbons, saturated and unsaturated fatty acids, waxes, terpenes, and polyalicyclic hydrocarbons such as adamantine and buckminsterfullerenes). In some embodiments, a lipophilic molecule is a terpenoid such as vitamin A, retinoic acid, retinal, or dehydroretinal. In some embodiments, a targeting moiety is a peptide.

[1311] In some embodiments, a P-modification moiety is a targeting agent of formula —X-L-R¹ wherein each of X, L, and R¹ are as defined in Formula I above.

[1312] In some embodiments, a P-modification moiety is characterized in that it facilitates cell specific delivery.

[1313] In some embodiments, a P-modification moiety is characterized in that it falls into one or more of the above-described categories. For instance, in some embodiments, a P-modification moiety acts as a PK enhancer and a targeting ligand. In some embodiments, a P-modification moiety acts as a pro-drug and an endosomal escape agent. One of skill in the relevant arts would recognize that numerous other such combinations are possible and are contemplated by the present disclosure.

[1314] In some embodiments, a carbocyclyl, aryl, heteroaryl, or heterocyclyl group, or a bivalent or polyvalent group thereof, is a C₃-C₃₀ carbocyclyl, aryl, heteroaryl, or heterocyclyl group, or a bivalent and/or polyvalent group thereof.

### Nucleobases

[1315] In some embodiments, a nucleobase present in a provided oligonucleotide is a natural nucleobase or a modified nucleobase derived from a natural nucleobase. Examples include, but are not limited to, uracil, thymine, adenine, cytosine, and guanine having their respective amino groups protected by acyl protecting groups, 2-fluorouracil, 2-fluorocytosine, 5-bromouracil, 5-iodouracil, 2,6-diaminopurine, azacytosine, pyrimidine analogs such as pseudoisocytosine and pseudouracil and other modified nucleobases such as 8-substituted purines, xanthine, or hypoxanthine (the latter two being the natural degradation products). Example modified nucleobases are disclosed in Chiu and Rana, RNA, 2003, 9, 1034-1048, Limbach et al. Nucleic Acids Research, 1994, 22, 2183-2196 and Revankar and Rao, Comprehensive Natural Products Chemistry, vol. 7, 313. In some embodiments, a modified nucleobase is substituted uracil, thymine, adenine, cytosine, or guanine. In some embodiments, a modified nucleobase is a functional replacement, e.g., in terms of hydrogen bonding and/or base pairing, of uracil, thymine, adenine, cytosine, or guanine. In some embodiments, a nucleobase is optionally substituted uracil, thymine, adenine, cytosine, 5-methylcytosine, or guanine. In some embodiments, a nucleobase is uracil, thymine, adenine, cytosine, 5-methylcytosine, or guanine.

[1316] In some embodiments, a modified base is optionally substituted adenine, cytosine, guanine, thymine, or uracil. In some embodiments, a modified nucleobase is independently adenine, cytosine, guanine, thymine or uracil, modified by one or more modifications by which:

[1317] (1) a nucleobase is modified by one or more optionally substituted groups independently selected from acyl, halogen, amino, azide, alkyl, alkenyl, alkynyl, aryl, heteroalkyl, heteroalkenyl, heteroalkynyl, heterocyclyl, heteroaryl, carboxyl, hydroxyl, biotin, avidin, streptavidin, substituted silyl, and combinations thereof;

[1318] (2) one or more atoms of a nucleobase are independently replaced with a different atom selected from carbon, nitrogen or sulfur;

[1319] (3) one or more double bonds in a nucleobase are independently hydrogenated; or

[1320] (4) one or more aryl or heteroaryl rings are independently inserted into a nucleobase.

[1321] Structures represented by the following general formulae are also contemplated as modified nucleobases:

[chemical structure]

[chemical structure]

wherein R⁸ is an optionally substituted, linear or branched group selected from aliphatic, aryl, aralkyl, aryloxylalkyl, carbocyclyl, heterocyclyl or heteroaryl group having 1 to 15 carbon atoms, including, by way of example only, a methyl, isopropyl, phenyl, benzyl, or phenoxymethyl group; and each of R⁹ and R¹⁰ is independently an optionally substituted group selected from linear or branched aliphatic, carbocyclyl, aryl, heterocyclyl and heteroaryl.

[1322] Modified nucleobases also include expanded-size nucleobases in which one or more aryl rings, such as phenyl rings, have been added. Nucleic base replacements described in the Glen Research catalog (www.glenresearch.com); Krueger A T et al, Acc. Chem. Res., 2007, 40, 141-150; Kool, E T, Acc. Chem. Res., 2002, 35, 936-943; Benner S. A., et al., Nat. Rev. Genet., 2005, 6, 553-543; Romesberg, F. E., et al., Curr. Opin. Chem. Biol., 2003, 7, 723-733; Hirao, I., Curr. Opin. Chem. Biol., 2006, 10, 622-627, are contemplated as useful for the synthesis of the nucleic acids described herein. Some examples of these expanded-size nucleobases are shown below:

[chemical structure]

[chemical structure]

[1323] Herein, modified nucleobases also encompass structures that are not considered nucleobases but are other moieties such as, but not limited to, corrin- or porphyrin-derived rings. Porphyrin-derived base replacements have been described in Morales-Rojas, H and Kool, E T, Org. Lett., 2002, 4, 4377-4380. Shown below is an example of a porphyrin-derived ring which can be used as a base replacement:

[chemical structure]

[1324] In some embodiments, modified nucleobases are of any one of the following structures, optionally substituted:

[chemical structure]

[1325] In some embodiments, a modified nucleobase is fluorescent. Example such fluorescent modified nucleobases include phenanthrene, pyrene, stillbene, isoxanthine, isozanthopterin, terphenyl, terthiophene, benzoterthiophene, coumarin, lumazine, tethered stillbene, benzo-uracil, and naphtho-uracil, as shown below:

[chemical structure]

[chemical structure]

[1326] In some embodiments, a modified nucleobase is unsubstituted. In some embodiments, a modified nucleobase is substituted. In some embodiments, a modified nucleobase is substituted such that it contains, e.g., heteroatoms, alkyl groups, or linking moieties connected to fluorescent moieties, biotin or avidin moieties, or other protein or peptides. In some embodiments, a modified nucleobase is a “universal base” that is not a nucleobase in the most classical sense, but that functions similarly to a nucleobase. One representative example of such a universal base is 3-nitropyrrole.

[1327] In some embodiments, other nucleosides can also be used in the process disclosed herein and include nucleosides that incorporate modified nucleobases, or nucleobases covalently bound to modified sugars. Some examples of nucleosides or nucleotides that incorporate modified nucleobases include 4-acetylcytidine; 5-(carboxyhydroxylmethyl)uridine; 2′-O-methylcytidine; 5-carboxymethylaminomethyl-2-thiouridine; 5-carboxymethylaminomethyluridine; dihydrouridine; 2′-O-methylpseudouridine; beta,D-galactosylqueosine; 2′-O-methylguanosine; N⁶-isopentenyladenosine; 1-methyladenosine; 1-methylpseudouridine; 1-methylguanosine; 1-methylinosine; 2,2-dimethylguanosine; 2-methyladenosine; 2-methylguanosine; N⁷-methylguanosine; 3-methyl-cytidine; 5-methylcytidine; 5-hydroxymethylcytidine; 5-formylcytosine; 5-carboxylcytosine; N⁶-methyladenosine; 7-methylguanosine; 5-methylaminoethyluridine; 5-methoxyaminomethyl-2-thiouridine; beta,D-mannosylqueosine; 5-methoxycarbonylmethyluridine; 5-methoxyuridine; 2-methylthio-N⁶-isopentenyladenosine; N-((9-beta,D-ribofuranosyl-2-methylthiopurine-6-yl)carbamoyl)threonine; N-((9-beta,D-ribofuranosylpurine-6-yl)-N-methylcarbamoyl)threonine; uridine-5-oxyacetic acid methylester; uridine-5-oxyacetic acid (v); pseudouridine; queosine; 2-thiocytidine; 5-methyl-2-thiouridine; 2-thiouridine; 4-thiouridine; 5-methyluridine; 2′-O-methyl-5-methyluridine; and 2′-O-methyluridine.

[1328] In some embodiments, nucleosides include 6′-modified bicyclic nucleoside analogs that have either (R) or (S)-chirality at the 6′-position and include the analogs described in U.S. Pat. No. 7,399,845. In other embodiments, nucleosides include 5′-modified bicyclic nucleoside analogs that have either (R) or (S)-chirality at the 5′-position and include the analogs described in US Patent Application Publication No. 20070287831.

[1329] In some embodiments, a nucleobase or modified nucleobase comprises one or more biomolecule binding moieties such as e.g., antibodies, antibody fragments, biotin, avidin, streptavidin, receptor ligands, or chelating moieties. In other embodiments, a nucleobase or modified nucleobase is 5-bromouracil, 5-iodouracil, or 2,6-diaminopurine. In some embodiments, a nucleobase or modified nucleobase is modified by substitution with a fluorescent or biomolecule binding moiety. In some embodiments, the substituent on a nucleobase or modified nucleobase is a fluorescent moiety. In some embodiments, the substituent on a nucleobase or modified nucleobase is biotin or avidin.

[1330] Representative U.S. patents that teach the preparation of certain of the above noted modified nucleobases as well as other modified nucleobases include, but are not limited to, the above noted U.S. Pat. No. 3,687,808, as well as U.S. Pat. Nos. 4,845,205; 5,130,30; 5,134,066; 5,175,273; 5,367,066; 5,432,272; 5,457,187; 5,457,191; 5,459,255; 5,484,908; 5,502,177; 5,525,711; 5,552,540; 5,587,469; 5,594,121, 5,596,091; 5,614,617; 5,681,941; 5,750,692; 6,015,886; 6,147,200; 6,166,197; 6,222,025; 6,235,887; 6,380,368; 6,528,640; 6,639,062; 6,617,438; 7,045,610; 7,427,672; and 7,495,088, the modified nucleobases, sugars, and internucleotidic linkages of each of which are incorporated by reference.

[1331] In some embodiments, a base is optionally substituted A, T, C, G or U, wherein one or more —NH₂ are independently and optionally replaced with —C(-L-R¹)₃, one or more —NH— are independently and optionally replaced with —C(-L-R¹)₂—, one or more ═N— are independently and optionally replaced with —C(-L-R¹)—, one or more ═CH— are independently and optionally replaced with ═N—, and one or more ═O are independently and optionally replaced with ═S, ═N(-L-R¹), or ═C(-L-R¹)₂, wherein two or more -L-R¹ are optionally taken together with their intervening atoms to form a 3-30 membered bicyclic or polycyclic ring having 0-10 heteroatom ring atoms. In some embodiments, a modified base is optionally substituted A, T, C, G or U, wherein one or more —NH₂ are independently and optionally replaced with —C(-L-R¹)₃, one or more —NH— are independently and optionally replaced with —C(-L-R¹)₂—, one or more ═N— are independently and optionally replaced with —C(-L-R¹)—, one or more ═CH— are independently and optionally replaced with ═N—, and one or more ═O are independently and optionally replaced with ═S, ═N(-L-R¹), or ═C(-L-R¹)₂, wherein two or more -L-R¹ are optionally taken together with their intervening atoms to form a 3-30 membered bicyclic or polycyclic ring having 0-10 heteroatom ring atoms, wherein the modified base is different than the natural A, T, C, G and U. In some embodiments, a base is optionally substituted A, T, C, G or U. In some embodiments, a modified base is substituted A, T, C, G or U, wherein the modified base is different than the natural A, T, C, G and U.

[1332] In some embodiments, a modified nucleotide or nucleotide analog is any modified nucleotide or nucleotide analog described in any of: Albaek et al. 2006 J. Org. Chem. 71: 7731-7740; Braasch et al., Chem. Biol., 2001, 8, 1-7; Chattopadhyaya et al. 2009 J. Org. Chem. 74: 18-134; Elayadi et al, Curr. Opinion Invens. Drugs, 2001, 2, 5561; Frieden et al. 2003 Nucl. Acids Res. 21: 6365-6372; Freier et al. 1997 Nucl. Acids Res. 25: 4429-4443; Gryaznov et al. Am. Chem. Soc. 1994, 116, 3143; Hendrix et al. 1997 Chem. Eur. J. 3: 110; Hyrup et al. 1996 Bioorg. Med. Chem. 4: 5; Jepsen et al. 2004 Oligo. 14: 130-146; Jones et al. J. Org. Chem. 1993, 58, 2983; Koizumi et al. 2003 Nuc. Acids Res. 12: 3267-3273; Koshkin et al. 1998 Tetrahedron 54: 3607-3630; Kumar et al. 1998 Bioo. Med. Chem. Let. 8: 2219-2222; Lauritsen et al. 2002 Chem. Comm. 5: 530-531; Lauritsen et al. 2003 Bioo. Med. Chem. Lett. 13: 253-256; Leumann et al. 2002 Bioorg. Med. Chem. 10: 841-854; Mesmaeker et al. Angew. Chem., Int. Ed. Engl. 1994, 33, 226; Morita et al. 2001 Nucl. Acids Res. Supp. 1: 241-242; Morita et al. 2002 Bioo. Med. Chem. Lett. 12: 73-76; Morita et al. 2003 Bioo. Med. Chem. Lett. 2211-2226; Nielsen et al. 1997 Chem. Soc. Rev. 73; Nielsen et al. 1997 J. Chem. Soc. Perkins Transl. 1: 3423-3433; Obika et al. 1997 Tetrahedron Lett. 38 (50): 8735-8; Obika et al. 1998 Tetrahedron Lett. 39: 5401-5404; Oram et al, Curr. Opinion Mol. Ther., 2001, 3, 239-243; Pallan et al. 2012 Chem. Comm. 48: 8195-8197; Petersen et al. 2003 TRENDS Biotech. 21: 74-81; Rajwanshi et al. 1999 Chem. Commun. 1395-1396; Schultz et al. 1996 Nucleic Acids Res. 24: 2966; Seth et al. 2009 J. Med. Chem. 52: 10-13; Seth et al. 2010 J. Med. Chem. 53: 8309-8318; Seth et al. 2010 J. Org. Chem. 75: 1569-1581; Seth et al. 2012 Bioo. Med. Chem. Lett. 22: 296-299; Seth et al. 2012 Mol. Ther-Nuc. Acids. 1, e47; Seth et al. From Nucleic Acids Symposium Series (2008), 52(1), 553-554; Singh et al. 1998 Chem. Comm. 1247-1248; Singh et al. 1998 J. Org. Chem. 63: 10035-39; Singh et al. 1998 J. Org. Chem. 63: 6078-6079; Singh et al. 1998 Chem. Commun. 4: 455-456; Sorensen 2003 Chem. Comm. 2130-2131; Srivastava et al. 2007 J. Am. Chem. Soc, 129: 8362-8379; Ts'o et al. Ann. N. Y. Acad. Sci. 1988, 507, 220; Van Aerschot et al. 1995 Angew. Chem. Int. Ed. Engl. 34: 1338; Vasseur et al. J. Am. Chem. Soc. 1992, 114, 4006; Wahlestedt et al. 2000 Proc. Natl. Acad. Sci. U.S.A 97: 5633-5638; U.S. Pat. Nos. 3,687,808; 4,845,205; 5,130,302; 5,134,066; 5,175,273; 5,367,066; 5,432,272; 5,457,187; 5,459,255; 5,484,908; 5,502,177; 5,525,711; 5,552,540; 5,587,469; 5,594,121; 5,596,091; 5,614,617; 5,645,985; 5,681,941; 5,750,692; 6,268,490; 6,525,191; 6,670,461; 6,770,748; 6,794,499; 7,034,133; 7,053,207; 7,399,845; and 7,427,672; U.S. Patent Publication Nos. US2004/0171570; US2005/0130923; US2007/0287831; and US2008/0039618; U.S. patent application Ser. Nos. 12/129,154; 60/989,574; 61/026,995; 61/026,998; 61/056,564; 61/086,231; 61/097,787; and 61/099,844; PCT International Applications Nos. PCT/US2008/064591; PCT/US2008/066154; and PCT/US2008/068922. WO 2004/106356; WO 1994/14226; WO 2005/021570; WO 2007/134181; WO 2007/0900071; WO 2008/154401; WO2008/101157; WO2008/150729; WO2009/006478; or WO 2016/079181. Example nucleobases are also described in US 20110294124, US 20120316224, US 20140194610, US 20150211006, US 20150197540, WO 2015107425, PCT/US2016/043542, and PCT/US2016/043598, each of which is incorporated herein by reference.

### Sugars

[1333] In some embodiments, provided oligonucleotides comprise one or more modified sugar moieties.

[1334] The most common naturally occurring nucleotides are comprised of ribose sugars linked to the nucleobases adenosine (A), cytosine (C), guanine (G), and thymine (T) or uracil (U). Also contemplated are modified nucleotides wherein a phosphate group or linkage phosphorus in the nucleotides can be linked to various positions of a sugar or modified sugar. As non-limiting examples, the phosphate group or linkage phosphorus can be linked to the 2′, 3′, 4′ or 5′ hydroxyl moiety of a sugar or modified sugar. Nucleotides that incorporate modified nucleobases as described herein are also contemplated in this context. In some embodiments, nucleotides or modified nucleotides comprising an unprotected —OH moiety are used in accordance with methods of the present disclosure.

[1335] Other modified sugars can also be incorporated within a provided oligonucleotide. In some embodiments, a modified sugar contains one or more substituents at the 2′ position including one of the following: —F; —CF₃, —CN, —N₃, —NO, —NO₂, —OR′, —SR′, or —N(R′)₂, wherein each R′ is independently as defined above and described herein; —O—(C₁-C₁₀ alkyl), —S—(C₁-C₁₀ alkyl), —NH—(C₁-C₁₀ alkyl), or —N(C₁-C₁₀ alkyl)₂; —O—(C₂-C₁₀ alkenyl), —S—(C₂-C₁₀ alkenyl), —NH—(C₂-C₁₀ alkenyl), or —N(C₂-C₁₀ alkenyl)₂; —O—(C₂-C₁₀ alkynyl), —S—(C₂-C₁₀ alkynyl), —NH—(C₂-C₁₀ alkynyl), or —N(C₂-C₁₀ alkynyl)₂; or —O—(C₁-C₁₀ alkylene)-O—(C₁-C₁₀ alkyl), —O—(C₁-C₁₀ alkylene)-NH—(C₁-C₁₀ alkyl) or —O—(C₁-C₁₀ alkylene)-NH(C₁-C₁₀ alkyl)₂, —NH—(C₁-C₁₀ alkylene)-O—(C₁-C₁₀ alkyl), or —N(C₁-C₁₀ alkyl)-(C₁-C₁₀ alkylene)-O—(C₁-C₁₀ alkyl), wherein the alkyl, alkylene, alkenyl and alkynyl may be substituted or unsubstituted. Examples of substituents include, and are not limited to, —O(CH₂)ₙOCH₃, and —O(CH₂)ₙNH₂, wherein n is from 1 to about 10, MOE, DMAOE, DMAEOE. Also contemplated herein are modified sugars described in WO 2001/088198; and Martin et al., Helv. Chim. Acta, 1995, 78, 486-504. In some embodiments, a modified sugar comprises one or more groups selected from a substituted silyl group, an RNA cleaving group, a reporter group, a fluorescent label, an intercalator, a group for improving the pharmacokinetic properties of a nucleic acid, a group for improving the pharmacodynamic properties of a nucleic acid, or other substituents having similar properties. In some embodiments, modifications are made at one or more of the the 2′, 3′, 4′, 5′, or 6′ positions of the sugar or modified sugar, including the 3′ position of the sugar on the 3′-terminal nucleotide or in the 5′ position of the 5′-terminal nucleotide.

[1336] In some embodiments, a 2′-modification is 2′-F.

[1337] In some embodiments, the 2′-OH of a ribose is replaced with a substituent including one of the following: —H, —F; —CF₃, —CN, —N₃, —NO, —NO₂, —OR′, —SR′, or —N(R′)₂, wherein each R′ is independently as defined above and described herein; —O—(C₁-C₁₀ alkyl), —S—(C₁-C₁₀ alkyl), —NH—(C₁-C₁₀ alkyl), or —N(C₁-C₁₀ alkyl)₂; —O—(C₂-C₁₀ alkenyl), —S—(C₂-C₁₀ alkenyl), —NH—(C₂-C₁₀ alkenyl), or —N(C₂-C₁₀ alkenyl)₂; —O—(C₂-C₁₀ alkynyl), —S—(C₂-C₁₀ alkynyl), —NH—(C₂-C₁₀ alkynyl), or —N(C₂-C₁₀ alkynyl)₂; or —O—(C₁-C₁₀ alkylene)-O—(C₁-C₁₀ alkyl), —O—(C₁-C₁₀ alkylene)-NH—(C₁-C₁₀ alkyl) or —O—(C₁-C₁₀ alkylene)-NH(C₁-C₁₀ alkyl)₂, —NH—(C₁-C₁₀ alkylene)-O—(C₁-C₁₀ alkyl), or —N(C₁-C₁₀ alkyl)-(C₁-C₁₀ alkylene)-O—(C₁-C₁₀ alkyl), wherein the alkyl, alkylene, alkenyl and alkynyl may be substituted or unsubstituted. In some embodiments, the 2′-OH is replaced with —H (deoxyribose). In some embodiments, the 2′-OH is replaced with —F. In some embodiments, the 2′-OH is replaced with —OR′. In some embodiments, the 2′-OH is replaced with —OMe. In some embodiments, the 2′-OH is replaced with —OCH₂CH₂OMe.

[1338] Modified sugars also include locked nucleic acids (LNAs). In some embodiments, two substituents on sugar carbon atoms are taken together to form a bivalent moiety. In some embodiments, two substituents are on two different sugar carbon atoms. In some embodiments, a formed bivalent moiety has the structure of -L- as defined herein. In some embodiments, -L- is —O—CH₂—, wherein —CH₂— is optionally substituted. In some embodiments, -L- is —O—CH₂—. In some embodiments, -L- is —O—CH(Et)-. In some embodiments, -L- is between C2 and C4 of a sugar moiety. In some embodiments, a locked nucleic acid has the structure indicated below. A locked nucleic acid of the structure below is indicated, wherein Ba represents a nucleobase or modified nucleobase as described herein, and wherein R^{2s} is —OCH₂C4′-.

[chemical structure]

[1339] In some embodiments, a modified sugar is an ENA such as those described in, e.g., Seth et al., J Am Chem Soc. 2010 Oct. 27; 132(42): 14942-14950. In some embodiments, a modified sugar is any of those found in an XNA (xenonucleic acid), for instance, arabinose, anhydrohexitol, threose, 2′fluoroarabinose, or cyclohexene.

[1340] Modified sugars include sugar mimetics such as cyclobutyl or cyclopentyl moieties in place of the pentofuranosyl sugar. Representative United States patents that teach the preparation of such modified sugar structures include, but are not limited to, U.S. Pat. Nos. 4,981,957; 5,118,800; 5,319,080; and 5,359,044. Some modified sugars that are contemplated include sugars in which the oxygen atom within the ribose ring is replaced by nitrogen, sulfur, selenium, or carbon. In some embodiments, a modified sugar is a modified ribose wherein the oxygen atom within the ribose ring is replaced with nitrogen, and wherein the nitrogen is optionally substituted with an alkyl group (e.g., methyl, ethyl, isopropyl, etc).

[1341] Non-limiting examples of modified sugars include glycerol, which form glycerol nucleic acid (GNA) analogues. One example of a GNA analogue is shown below and is described in Zhang, R et al., J. Am. Chem. Soc., 2008, 130, 5846-5847; Zhang L, et al., J. Am. Chem. Soc., 2005, 127, 4174-4175 and Tsai C H et al., PNAS, 2007, 14598-14603 (X═O⁻):

[chemical structure]

[1342] Another example of a GNA derived analogue, flexible nucleic acid (FNA) based on the mixed acetal aminal of formyl glycerol, is described in Joyce G F et al., PNAS, 1987, 84, 4398-4402 and Heuberger B D and Switzer C, J. Am. Chem. Soc., 2008, 130, 412-413, and is shown below:

[chemical structure]

[1343] Additional non-limiting examples of modified sugars include hexopyranosyl (6′ to 4′), pentopyranosyl (4′ to 2′), pentopyranosyl (4′ to 3′), or tetrofuranosyl (3′ to 2′) sugars. In some embodiments, a hexopyranosyl (6′ to 4′) sugar is of any one in the following formulae:

[chemical structure]

wherein X^{s} corresponds to the P-modification group “—XLR¹” described herein and Ba is as defined herein.

[1344] In some embodiments, a pentopyranosyl (4′ to 2′) sugar is of any one in the following formulae:

[chemical structure]

wherein X^{s} corresponds to the P-modification group “—XLR¹” described herein and Ba is as defined herein.

[1345] In some embodiments, a pentopyranosyl (4′ to 3′) sugar is of any one in the following formulae:

[chemical structure]

wherein X^{s} corresponds to the P-modification group “—XLR¹” described herein and Ba is as defined herein.

[1346] In some embodiments, a tetrofuranosyl (3′ to 2′) sugar is of either in the following formulae:

[chemical structure]

wherein X^{s} corresponds to the P-modification group “—XLR¹” described herein and Ba is as defined herein.

[1347] In some embodiments, a modified sugar is of any one in the following formulae:

[chemical structure]

[chemical structure]

wherein X^{s} corresponds to the P-modification group “—XLR¹” described herein and Ba is as defined herein.

[1348] In some embodiments, one or more hydroxyl group in a sugar moiety is optionally and independently replaced with halogen, R′—N(R′)₂, —OR′, or —SR′, wherein each R′ is independently as defined above and described herein.

[1349] In some embodiments, a sugar mimetic is as illustrated below, wherein X^{s} corresponds to the P-modification group “—XLR¹” described herein, Ba is as defined herein, and X¹ is selected from —S—, —Se—, —CH₂—, —NMe-, —NEt- or —NiPr—.

[chemical structure]

[chemical structure]

[chemical structure]

[1350] In some embodiments, at least 1%, 2%, 3%, 4%, 5%, 6%, 7%, 8%, 9%, 10%, 11%, 12%, 13%, 14%, 15%, 16%, 17%, 18%, 19%, 20%, 21%, 22%, 23%, 24%, 25%, 26%, 27%, 28%, 29%, 30%, 31%, 32%, 33%, 34%, 35%, 36%, 37%, 38%, 39%, 40%, 41%, 42%, 43%, 44%, 45%, 46%, 47%, 48%, 49%, 50% or more (e.g., 55%, 60%, 65%, 70%, 75%, 80%, 85%, 90%, 95% or more), inclusive, of the sugars in a chirally controlled oligonucleotide composition are modified. In some embodiments, only purine residues are modified (e.g., about 1% 2%, 3%, 4%, 5% 6%, 7% 8%, 9%, 10%, 11%, 12%, 13%, 14%, 15%, 16%, 17%, 18%, 19%, 20%, 21%, 22%, 23%, 24%, 25%, 26%, 27%, 28%, 29%, 30%, 31%, 32%, 33%, 34%, 35%, 36%, 37%, 38%, 39%, 40%, 41%, 42%, 43%, 44%, 45%, 46%, 47%, 48%, 49%, 50% or more [e.g., 55%, 60%, 65%, 70%, 75%, 80%, 85%, 90%, 95% or more] of the purine residues are modified). In some embodiments, only pyrimidine residues are modified (e.g., about 1%, 2%, 3%, 4%, 5%, 6%, 7%, 8%, 9%, 10%, 11%, 12%, 13%, 14%, 15%, 16%, 17%, 18%, 19%, 20%, 21%, 22%, 23%, 24%, 25%, 26%, 27%, 28%, 29%, 30%, 31%, 32%, 33%, 34%, 35%, 36%, 37%, 38%, 39%, 40%, 41%, 42%, 43%, 44%, 45%, 46%, 47%, 48%, 49%, 50% or more [e.g., 55%, 60%, 65%, 70%, 75%, 80%, 85%, 90%, 95% or more] of the pyridimine residues are modified). In some embodiments, both purine and pyrimidine residues are modified.

[1351] Modified sugars and sugar mimetics can be prepared by methods known in the art, including, but not limited to: A. Eschenmoser, Science (1999), 284:2118; M. Bohringer et al, Helv. Chim. Acta (1992), 75:1416-1477; M. Egli et al, J. Am. Chem. Soc. (2006), 128(33):10847-56; A. Eschenmoser in Chemical Synthesis: Gnosis to Prognosis, C. Chatgilialoglu and V. Sniekus, Ed., (Kluwer Academic, Netherlands, 1996), p. 293; K.-U. Schoning et al, Science (2000), 290:1347-1351; A. Eschenmoser et al, Helv. Chim. Acta (1992), 75:218; J. Hunziker et al, Helv. Chim. Acta (1993), 76:259; G. Otting et al, Helv. Chim. Acta (1993), 76:2701; K. Groebke et al, Helv. Chim. Acta (1998), 81:375; and A. Eschenmoser, Science (1999), 284:2118. Modifications to the 2′ modifications can be found in Verma, S. et al. Annu. Rev. Biochem. 1998, 67, 99-134 and all references therein. Specific modifications to the ribose can be found in the following references: 2′-fluoro (Kawasaki et. al., J. Med. Chem., 1993, 36, 831-841), 2′-MOE (Martin, P. Helv. Chim. Acta 1996, 79, 1930-1938), “LNA” (Wengel, J. Acc. Chem. Res. 1999, 32, 301-310). In some embodiments, a modified sugar is any of those described in PCT Publication No. WO2012/030683, incorporated herein by reference, and/or depicted herein. In some embodiments, a modified sugar is any modified sugar described in any of: Gryaznov, S; Chen, J.-K. J. Am. Chem. Soc. 1994, 116, 3143; Hendrix et al. 1997 Chem. Eur. J. 3: 110; Hyrup et al. 1996 Bioorg. Med. Chem. 4: 5; Jepsen et al. 2004 Oligo. 14: 130-146; Jones et al. J. Org. Chem. 1993, 58, 2983; Koizumi et al. 2003 Nuc. Acids Res. 12: 3267-3273; Koshkin et al. 1998 Tetrahedron 54: 3607-3630; Kumar et al. 1998 Bioo. Med. Chem. Let. 8: 2219-2222; Lauritsen et al. 2002 Chem. Comm. 5: 530-531; Lauritsen et al. 2003 Bioo. Med. Chem. Lett. 13: 253-256; Mesmaeker et al. Angew. Chem., Int. Ed. Engl. 1994, 33, 226; Morita et al. 2001 Nucl. Acids Res. Supp. 1: 241-242; Morita et al. 2002 Bioo. Med. Chem. Lett. 12: 73-76; Morita et al. 2003 Bioo. Med. Chem. Lett. 2211-2226; Nielsen et al. 1997 Chem. Soc. Rev. 73; Nielsen et al. 1997 J. Chem. Soc. Perkins Transl. 1: 3423-3433; Obika et al. 1997 Tetrahedron Lett. 38 (50): 8735-8; Obika et al. 1998 Tetrahedron Lett. 39: 5401-5404; Pallan et al. 2012 Chem. Comm. 48: 8195-8197; Petersen et al. 2003 TRENDS Biotech. 21: 74-81; Rajwanshi et al. 1999 Chem. Commun. 1395-1396; Schultz et al. 1996 Nucleic Acids Res. 24: 2966; Seth et al. 2009 J. Med. Chem. 52: 10-13; Seth et al. 2010 J. Med. Chem. 53: 8309-8318; Seth et al. 2010 J. Org. Chem. 75: 1569-1581; Seth et al. 2012 Bioo. Med. Chem. Lett. 22: 296-299; Seth et al. 2012 Mol. Ther-Nuc. Acids. 1, e47; Seth, Punit P; Siwkowski, Andrew; Allerson, Charles R; Vasquez, Guillermo; Lee, Sam; Prakash, Thazha P; Kinberger, Garth; Migawa, Michael T; Gaus, Hans; Bhat, Balkrishen; et al. From Nucleic Acids Symposium Series (2008), 52(1), 553-554; Singh et al. 1998 Chem. Comm. 1247-1248; Singh et al. 1998 J. Org. Chem. 63: 10035-39; Singh et al. 1998 J. Org. Chem. 63: 6078-6079; Sorensen 2003 Chem. Comm. 2130-2131; Ts'o et al. Ann. N. Y. Acad. Sci. 1988, 507, 220; Van Aerschot et al. 1995 Angew. Chem. Int. Ed. Engl. 34: 1338; Vasseur et al. J. Am. Chem. Soc. 1992, 114, 4006; WO 20070900071; WO 20070900071; or WO 2016/079181.

[1352] In some embodiments, a modified sugar moiety is an optionally substituted pentose or hexose moiety. In some embodiments, a modified sugar moiety is an optionally substituted pentose moiety. In some embodiments, a modified sugar moiety is an optionally substituted hexose moiety. In some embodiments, a modified sugar moiety is an optionally substituted ribose or hexitol moiety. In some embodiments, a modified sugar moiety is an optionally substituted ribose moiety. In some embodiments, a modified sugar moiety is an optionally substituted hexitol moiety.

[1353] In some embodiments, an example modified internucleotidic linkage and/or sugar is selected from those of:

[chemical structure]

[chemical structure]

[chemical structure]

[chemical structure]

In some embodiments, R¹ is R as defined and described. In some embodiments, R² is R. In some embodiments, R^{e} is R. In some embodiments, R^{e} is H, CH₃, Bn, COCF₃, benzoyl, benzyl, pyren-1-ylcarbonyl, pyren-1-ylmethyl, 2-aminoethyl. In some embodiments, an example modified internucleotidic linkage and/or sugar is selected from those described in Ts'o et al. Ann. N. Y. Acad. Sci. 1988, 507, 220; Gryaznov, S.; Chen, J.-K. J. Am. Chem. Soc. 1994, 116, 3143; Mesmaeker et al. Angew. Chem., Int. Ed. Engl. 1994, 33, 226; Jones et al. J. Org. Chem. 1993, 58, 2983; Vasseur et al. J. Am. Chem. Soc. 1992, 114, 4006; Van Aerschot et al. 1995 Angew. Chem. Int. Ed. Engl. 34: 1338; Hendrix et al. 1997 Chem. Eur. J. 3: 110; Koshkin et al. 1998 Tetrahedron 54: 3607-3630; Hyrup et al. 1996 Bioorg. Med. Chem. 4: 5; Nielsen et al. 1997 Chem. Soc. Rev. 73; Schultz et al. 1996 Nucleic Acids Res. 24: 2966; Obika et al. 1997 Tetrahedron Lett. 38 (50): 8735-8; Obika et al. 1998 Tetrahedron Lett. 39: 5401-5404; Singh et al. 1998 Chem. Comm. 1247-1248; Kumar et al. 1998 Bioo. Med. Chem. Let. 8: 2219-2222; Nielsen et al. 1997 J. Chem. Soc. Perkins Transl. 1: 3423-3433; Singh et al. 1998 J. Org. Chem. 63: 6078-6079; Seth et al. 2010 J. Org. Chem. 75: 1569-1581; Singh et al. 1998 J. Org. Chem. 63: 10035-39; Sorensen 2003 Chem. Comm. 2130-2131; Petersen et al. 2003 TRENDS Biotech. 21: 74-81; Rajwanshi et al. 1999 Chem. Commun. 1395-1396; Jepsen et al. 2004 Oligo. 14: 130-146; Morita et al. 2001 Nucl. Acids Res. Supp. 1: 241-242; Morita et al. 2002 Bioo. Med. Chem. Lett. 12: 73-76; Morita et al. 2003 Bioo. Med. Chem. Lett. 2211-2226; Koizumi et al. 2003 Nuc. Acids Res. 12: 3267-3273; Lauritsen et al. 2002 Chem. Comm. 5: 530-531; Lauritsen et al. 2003 Bioo. Med. Chem. Lett. 13: 253-256; WO 20070900071; Seth et al., Nucleic Acids Symposium Series (2008), 52(1), 553-554; Seth et al. 2009 J. Med. Chem. 52: 10-13; Seth et al. 2012 Mol. Ther-Nuc. Acids. 1, e47; Pallan et al. 2012 Chem. Comm. 48: 8195-8197; Seth et al. 2010 J. Med. Chem. 53: 8309-8318; Seth et al. 2012 Bioo. Med. Chem. Lett. 22: 296-299; WO 2016/079181; U.S. Pat. Nos. 6,326,199; 6,066,500; and 6,440,739, the base and sugar modifications of each of which is herein incorporated by reference.

[1354] In some embodiments, the present disclosure provides oligonucleotides and oligonucleotide compositions that are chirally controlled. For instance, in some embodiments, a provided composition contains predetermined levels of one or more individual oligonucleotide types, wherein an oligonucleotide type is defined by: 1) base sequence; 2) pattern of backbone linkages; 3) pattern of backbone chiral centers; and 4) pattern of backbone P-modifications. In some embodiments, a particular oligonucleotide type may be defined by 1A) base identity; 1B) pattern of base modification; 1C) pattern of sugar modification; 2) pattern of backbone linkages; 3) pattern of backbone chiral centers; and 4) pattern of backbone P-modifications. In some embodiments, oligonucleotides of the same oligonucleotide type are identical.

[1355] In some embodiments, a provided oligonucleotide is a unimer. In some embodiments, a provided oligonucleotide is a P-modification unimer. In some embodiments, a provided oligonucleotide is a stereounimer. In some embodiments, a provided oligonucleotide is a stereounimer of configuration Rp. In some embodiments, a provided oligonucleotide is a stereounimer of configuration Sp.

[1356] In some embodiments, a provided oligonucleotide is an altmer. In some embodiments, a provided oligonucleotide is a P-modification altmer. In some embodiments, a provided oligonucleotide is a stereoaltmer.

[1357] In some embodiments, a provided oligonucleotide is a blockmer. In some embodiments, a provided oligonucleotide is a P-modification blockmer. In some embodiments, a provided oligonucleotide is a stereoblockmer.

[1358] In some embodiments, a provided oligonucleotide is a gapmer.

[1359] In some embodiments, a provided oligonucleotide is a skipmer.

[1360] In some embodiments, a provided oligonucleotide is a hemimer. In some embodiments, a hemimer is an oligonucleotide wherein the 5′-end or the 3′-end has a sequence that possesses a structure feature that the rest of the oligonucleotide does not have. In some embodiments, the 5′-end or the 3′-end has or comprises 2 to 20 nucleotides. In some embodiments, a structural feature is a base modification. In some embodiments, a structural feature is a sugar modification. In some embodiments, a structural feature is a P-modification. In some embodiments, a structural feature is stereochemistry of the chiral internucleotidic linkage. In some embodiments, a structural feature is or comprises a base modification, a sugar modification, a P-modification, or stereochemistry of the chiral internucleotidic linkage, or combinations thereof. In some embodiments, a hemimer is an oligonucleotide in which each sugar moiety of the 5′-end sequence shares a common modification. In some embodiments, a hemimer is an oligonucleotide in which each sugar moiety of the 3′-end sequence shares a common modification. In some embodiments, a common sugar modification of the 5′ or 3′ end sequence is not shared by any other sugar moieties in the oligonucleotide. In some embodiments, an example hemimer is an oligonucleotide comprising a sequence of substituted or unsubstituted 2′-O-alkyl sugar modified nucleosides, bicyclic sugar modified nucleosides, β-D-ribonucleosides or β-D-deoxyribonucleosides (for example 2′-MOE modified nucleosides, and LNA™ or ENA™ bicyclic syugar modified nucleosides) at one terminus and a sequence of nucleosides with a different sugar moiety (such as a substituted or unsubstituted 2′-O-alkyl sugar modified nucleosides, bicyclic sugar modified nucleosides or natural ones) at the other terminus. In some embodiments, a provided oligonucleotide is a combination of one or more of unimer, altmer, blockmer, gapmer, hemimer and skipmer. In some embodiments, a provided oligonucleotide is a combination of one or more of unimer, altmer, blockmer, gapmer, and skipmer. For instance, in some embodiments, a provided oligonucleotide is both an altmer and a gapmer. In some embodiments, a provided nucleotide is both a gapmer and a skipmer. One of skill in the chemical and synthetic arts will recognize that numerous other combinations of patterns are available and are limited only by the commercial availability and/or synthetic accessibility of constituent parts required to synthesize a provided oligonucleotide in accordance with methods of the present disclosure. In some embodiments, a hemimer structure provides advantageous benefits, as exemplified by FIG. 29. In some embodiments, provided oligonucleotides are 5′-hemmimers that comprises modified sugar moieties in a 5′-end sequence. In some embodiments, provided oligonucleotides are 5′-hemmimers that comprises modified 2′-sugar moieties in a 5′-end sequence.

[1361] In some embodiments, a provided oligonucleotide comprises one or more optionally substituted nucleotides. In some embodiments, a provided oligonucleotide comprises one or more modified nucleotides. In some embodiments, a provided oligonucleotide comprises one or more optionally substituted nucleosides. In some embodiments, a provided oligonucleotide comprises one or more modified nucleosides. In some embodiments, a provided oligonucleotide comprises one or more optionally substituted LNAs.

[1362] In some embodiments, a provided oligonucleotide comprises one or more optionally substituted nucleobases. In some embodiments, a provided oligonucleotide comprises one or more optionally substituted natural nucleobases. In some embodiments, a provided oligonucleotide comprises one or more optionally substituted modified nucleobases. In some embodiments, a provided oligonucleotide comprises one or more 5-methylcytidine; 5-hydroxymethylcytidine, 5-formylcytosine, or 5-carboxylcytosine. In some embodiments, a provided oligonucleotide comprises one or more 5-methylcytidine.

[1363] In some embodiments, a provided oligonucleotide comprises one or more optionally substituted sugars. In some embodiments, a provided oligonucleotide comprises one or more optionally substituted sugars found in naturally occurring DNA and RNA. In some embodiments, a provided oligonucleotide comprises one or more optionally substituted ribose or deoxyribose. In some embodiments, a provided oligonucleotide comprises one or more optionally substituted ribose or deoxyribose, wherein one or more hydroxyl groups of the ribose or deoxyribose moiety is optionally and independently replaced by halogen, R′, —N(R′)₂, —OR′, or —SR′, wherein each R′ is independently as defined above and described herein. In some embodiments, a provided oligonucleotide comprises one or more optionally substituted deoxyribose, wherein the 2′ position of the deoxyribose is optionally and independently substituted with halogen, R′, —N(R′)₂, —OR′, or —SR′, wherein each R′ is independently as defined above and described herein. In some embodiments, a provided oligonucleotide comprises one or more optionally substituted deoxyribose, wherein the 2′ position of the deoxyribose is optionally and independently substituted with halogen. In some embodiments, a provided oligonucleotide comprises one or more optionally substituted deoxyribose, wherein the 2′ position of the deoxyribose is optionally and independently substituted with one or more —F. halogen. In some embodiments, a provided oligonucleotide comprises one or more optionally substituted deoxyribose, wherein the 2′ position of the deoxyribose is optionally and independently substituted with —OR′, wherein each R′ is independently as defined above and described herein. In some embodiments, a provided oligonucleotide comprises one or more optionally substituted deoxyribose, wherein the 2′ position of the deoxyribose is optionally and independently substituted with —OR′, wherein each R′ is independently an optionally substituted C₁-C₆ aliphatic. In some embodiments, a provided oligonucleotide comprises one or more optionally substituted deoxyribose, wherein the 2′ position of the deoxyribose is optionally and independently substituted with —OR′, wherein each R′ is independently an optionally substituted C₁-C₆ alkyl. In some embodiments, a provided oligonucleotide comprises one or more optionally substituted deoxyribose, wherein the 2′ position of the deoxyribose is optionally and independently substituted with —OMe. In some embodiments, a provided oligonucleotide comprises one or more optionally substituted deoxyribose, wherein the 2′ position of the deoxyribose is optionally and independently substituted with —O-methoxyethyl.

[1364] In some embodiments, a provided oligonucleotide is single-stranded oligonucleotide.

[1365] In some embodiments, a provided oligonucleotide is a hybridized oligonucleotide strand. In certain embodiments, a provided oligonucleotide is a partially hydridized oligonucleotide strand. In certain embodiments, a provided oligonucleotide is a completely hydridized oligonucleotide strand. In certain embodiments, a provided oligonucleotide is a double-stranded oligonucleotide. In certain embodiments, a provided oligonucleotide is a triple-stranded oligonucleotide (e.g., a triplex).

[1366] In some embodiments, a provided oligonucleotide is chimeric. For example, in some embodiments, a provided oligonucleotide is DNA-RNA chimera, DNA-LNA chimera, etc.

[1367] In some embodiments, any one of the structures comprising an oligonucleotide depicted in WO2012/030683 can be modified in accordance with methods of the present disclosure to provide chirally controlled variants thereof. For example, in some embodiments the chirally controlled variants comprise a stereochemical modification at any one or more of the linkage phosphorus and/or a P-modification at any one or more of the linkage phosphorus. For example, in some embodiments, a particular nucleotide unit of an oligonucleotide of WO2012/030683 is preselected to be stereochemically modified at the linkage phosphorus of that nucleotide unit and/or P-modified at the linkage phosphorus of that nucleotide unit. e.g., The related disclosure of WO2012/030683 is herein incorporated by reference in its entirety.

[1368] In some embodiments, a provided oligonucleotide is a therapeutic agent.

[1369] In some embodiments, a provided oligonucleotide is an antisense oligonucleotide.

[1370] In some embodiments, a provided oligonucleotide is an antigene oligonucleotide.

[1371] In some embodiments, a provided oligonucleotide is a decoy oligonucleotide.

[1372] In some embodiments, a provided oligonucleotide is part of a DNA vaccine.

[1373] In some embodiments, a provided oligonucleotide is an immunomodulatory oligonucleotide, e.g., immunostimulatory oligonucleotide and immunoinhibitory oligonucleotide.

[1374] In some embodiments, a provided oligonucleotide is an adjuvant.

[1375] In some embodiments, a provided oligonucleotide is an aptamer.

[1376] In some embodiments, a provided oligonucleotide is a ribozyme.

[1377] In some embodiments, a provided oligonucleotide is a deoxyribozyme (DNAzymes or DNA enzymes).

[1378] In some embodiments, a provided oligonucleotide is an siRNA.

[1379] In some embodiments, a provided oligonucleotide is a microRNA, or miRNA.

[1380] In some embodiments, a provided oligonucleotide is a ncRNA (non-coding RNAs), including a long non-coding RNA (lncRNA) and a small non-coding RNA, such as piwi-interacting RNA (piRNA).

[1381] In some embodiments, a provided oligonucleotide is complementary to a structural RNA, e.g., tRNA.

[1382] In some embodiments, a provided oligonucleotide is a nucleic acid analog, e.g., GNA, LNA, PNA, TNA and Morpholino.

[1383] In some embodiments, a provided oligonucleotide is a P-modified prodrug.

[1384] In some embodiments, a provided oligonucleotide is a primer. In some embodiments, a primers is for use in polymerase-based chain reactions (i.e., PCR) to amplify nucleic acids. In some embodiments, a primer is for use in any known variations of PCR, such as reverse transcription PCR (RT-PCR) and real-time PCR.

[1385] In some embodiments, a provided oligonucleotide is characterized as having the ability to modulate RNase H activation. For example, in some embodiments, RNase H activation is modulated by the presence of stereocontrolled phosphorothioate nucleic acid analogs, with natural DNA/RNA being more or equally susceptible than the Rp stereoisomer, which in turn is more susceptible than the corresponding Sp stereoisomer.

[1386] In some embodiments, a provided oligonucleotide is characterized as having the ability to indirectly or directly increase or decrease activity of a protein or inhibition or promotion of the expression of a protein. In some embodiments, a provided oligonucleotide is characterized in that it is useful in the control of cell proliferation, viral replication, and/or any other cell signaling process.

[1387] In some embodiments, a provided oligonucleotide is from about 2 to about 200 nucleotide units in length. In some embodiments, a provided oligonucleotide is from about 2 to about 180 nucleotide units in length. In some embodiments, a provided oligonucleotide is from about 2 to about 160 nucleotide units in length. In some embodiments, a provided oligonucleotide is from about 2 to about 140 nucleotide units in length. In some embodiments, a provided oligonucleotide is from about 2 to about 120 nucleotide units in length. In some embodiments, a provided oligonucleotide is from about 2 to about 100 nucleotide units in length. In some embodiments, a provided oligonucleotide is from about 2 to about 90 nucleotide units in length. In some embodiments, a provided oligonucleotide is from about 2 to about 80 nucleotide units in length. In some embodiments, a provided oligonucleotide is from about 2 to about 70 nucleotide units in length. In some embodiments, a provided oligonucleotide is from about 2 to about 60 nucleotide units in length. In some embodiments, a provided oligonucleotide is from about 2 to about 50 nucleotide units in length. In some embodiments, a provided oligonucleotide is from about 2 to about 40 nucleotide units in length. In some embodiments, a provided oligonucleotide is from about 2 to about 30 nucleotide units in length. In some embodiments, a provided oligonucleotide is from about 2 to about 29 nucleotide units in length. In some embodiments, a provided oligonucleotide is from about 2 to about 28 nucleotide units in length. In some embodiments, a provided oligonucleotide is from about 2 to about 27 nucleotide units in length. In some embodiments, a provided oligonucleotide is from about 2 to about 26 nucleotide units in length. In some embodiments, a provided oligonucleotide is from about 2 to about 25 nucleotide units in length. In some embodiments, a provided oligonucleotide is from about 2 to about 24 nucleotide units in length. In some embodiments, a provided oligonucleotide is from about 2 to about 23 nucleotide units in length. In some embodiments, a provided oligonucleotide is from about 2 to about 22 nucleotide units in length. In some embodiments, a provided oligonucleotide is from about 2 to about 21 nucleotide units in length. In some embodiments, a provided oligonucleotide is from about 2 to about 20 nucleotide units in length.

[1388] In some embodiments, a provided oligonucleotide is from about 4 to about 200 nucleotide units in length. In some embodiments, a provided oligonucleotide is from about 4 to about 180 nucleotide units in length. In some embodiments, a provided oligonucleotide is from about 4 to about 160 nucleotide units in length. In some embodiments, a provided oligonucleotide is from about 4 to about 140 nucleotide units in length. In some embodiments, a provided oligonucleotide is from about 4 to about 120 nucleotide units in length. In some embodiments, a provided oligonucleotide is from about 4 to about 100 nucleotide units in length. In some embodiments, a provided oligonucleotide is from about 4 to about 90 nucleotide units in length. In some embodiments, a provided oligonucleotide is from about 4 to about 80 nucleotide units in length. In some embodiments, a provided oligonucleotide is from about 4 to about 70 nucleotide units in length. In some embodiments, a provided oligonucleotide is from about 4 to about 60 nucleotide units in length. In some embodiments, a provided oligonucleotide is from about 4 to about 50 nucleotide units in length. In some embodiments, a provided oligonucleotide is from about 4 to about 40 nucleotide units in length. In some embodiments, a provided oligonucleotide is from about 4 to about 30 nucleotide units in length. In some embodiments, a provided oligonucleotide is from about 4 to about 29 nucleotide units in length. In some embodiments, a provided oligonucleotide is from about 4 to about 28 nucleotide units in length. In some embodiments, a provided oligonucleotide is from about 4 to about 27 nucleotide units in length. In some embodiments, a provided oligonucleotide is from about 4 to about 26 nucleotide units in length. In some embodiments, a provided oligonucleotide is from about 4 to about 25 nucleotide units in length. In some embodiments, a provided oligonucleotide is from about 4 to about 24 nucleotide units in length. In some embodiments, a provided oligonucleotide is from about 4 to about 23 nucleotide units in length. In some embodiments, a provided oligonucleotide is from about 4 to about 22 nucleotide units in length. In some embodiments, a provided oligonucleotide is from about 4 to about 21 nucleotide units in length. In some embodiments, a provided oligonucleotide is from about 4 to about 20 nucleotide units in length.

[1389] In some embodiments, a provided oligonucleotide is from about 5 to about 10 nucleotide units in length. In some embodiments, a provided oligonucleotide is from about 10 to about 30 nucleotide units in length. In some embodiments, a provided oligonucleotide is from about 15 to about 25 nucleotide units in length. In some embodiments, a provided oligonucleotide is from about 5, 6, 7, 8, 9, 10, 11, 12, 13, 14, 15, 16, 17, 18, 19, 20, 21, 22, 23, 24, or 25 nucleotide units in length.

[1390] In some embodiments, an oligonucleotide is at least 2 nucleotide units in length. In some embodiments, an oligonucleotide is at least 3 nucleotide units in length. In some embodiments, an oligonucleotide is at least 4 nucleotide units in length. In some embodiments, an oligonucleotide is at least 5 nucleotide units in length. In some embodiments, an oligonucleotide is at least 6 nucleotide units in length. In some embodiments, an oligonucleotide is at least 7 nucleotide units in length. In some embodiments, an oligonucleotide is at least 8 nucleotide units in length. In some embodiments, an oligonucleotide is at least 9 nucleotide units in length. In some embodiments, an oligonucleotide is at least 10 nucleotide units in length. In some embodiments, an oligonucleotide is at least 11 nucleotide units in length. In some embodiments, an oligonucleotide is at least 12 nucleotide units in length. In some embodiments, an oligonucleotide is at least 13 nucleotide units in length. In some embodiments, an oligonucleotide is at least 14 nucleotide units in length. In some embodiments, an oligonucleotide is at least 15 nucleotide units in length. In some embodiments, an oligonucleotide is at least 16 nucleotide units in length. In some embodiments, an oligonucleotide is at least 17 nucleotide units in length. In some embodiments, an oligonucleotide is at least 18 nucleotide units in length. In some embodiments, an oligonucleotide is at least 19 nucleotide units in length. In some embodiments, an oligonucleotide is at least 20 nucleotide units in length. In some embodiments, an oligonucleotide is at least 21 nucleotide units in length. In some embodiments, an oligonucleotide is at least 22 nucleotide units in length. In some embodiments, an oligonucleotide is at least 23 nucleotide units in length. In some embodiments, an oligonucleotide is at least 24 nucleotide units in length. In some embodiments, an oligonucleotide is at least 25 nucleotide units in length. In some other embodiments, an oligonucleotide is at least 30 nucleotide units in length. In some other embodiments, an oligonucleotide is a duplex of complementary strands of at least 18 nucleotide units in length. In some other embodiments, an oligonucleotide is a duplex of complementary strands of at least 21 nucleotide units in length.

[1391] In some embodiments, the 5′-end and/or the 3′-end of a provided oligonucleotide is modified. In some embodiments, the 5′-end and/or the 3′-end of a provided oligonucleotide is modified with a terminal cap moiety. Example such modifications, including terminal cap moieties are extensively described herein and in the art, for example but not limited to those described in US Patent Application Publication US 2009/0023675A1.

[1392] In some embodiments, oligonucleotides of an oligonucleotide type characterized by 1) a common base sequence and length, 2) a common pattern of backbone linkages, and 3) a common pattern of backbone chiral centers, have the same chemical structure. For example, they have the same base sequence, the same pattern of nucleoside modifications, the same pattern of backbone linkages (i.e., pattern of internucleotidic linkage types, for example, phosphate, phosphorothioate, etc), the same pattern of backbone chiral centers (i.e. pattern of linkage phosphorus stereochemistry (Rp/Sp)), and the same pattern of backbone phosphorus modifications (e.g., pattern of “—XLR¹” groups in formula I).

[1393] The present disclosure provides compositions comprising or consisting of a plurality of provided oligonucleotides (e.g., chirally controlled oligonucleotide compositions). In some embodiments, all such provided oligonucleotides are of the same type, i.e., all have the same base sequence, pattern of backbone linkages (i.e., pattern of internucleotidic linkage types, for example, phosphate, phosphorothioate, etc), pattern of backbone chiral centers (i.e. pattern of linkage phosphorus stereochemistry (Rp/Sp)), and pattern of backbone phosphorus modifications (e.g., pattern of “—XLR¹” groups in formula I). In some embodiments, all oligonucleotides of the same type are identical. In many embodiments, however, provided compositions comprise a plurality of oligonucleotides types, typically in pre-determined relative amounts.

[1394] In some embodiments, a provided chirally controlled oligonucleotide composition comprises a combination of one or more provided oligonucleotide types. One of skill in the chemical and medicinal arts will recognize that the selection and amount of each of the one or more types of provided oligonucleotides in a provided composition will depend on the intended use of that composition. That is to say, one of skill in the relevant arts would design a provided chirally controlled oligonucleotide composition such that the amounts and types of provided oligonucleotides contained therein cause the composition as a whole to have certain desirable characteristics (e.g., biologically desirable, therapeutically desirable, etc.).

[1395] In some embodiments, a provided chirally controlled oligonucleotide composition comprises a combination of two or more provided oligonucleotide types. In some embodiments, a provided chirally controlled oligonucleotide composition comprises a combination of three or more provided oligonucleotide types. In some embodiments, a provided chirally controlled oligonucleotide composition comprises a combination of four or more provided oligonucleotide types. In some embodiments, a provided chirally controlled oligonucleotide composition comprises a combination of five or more provided oligonucleotide types. In some embodiments, a provided chirally controlled oligonucleotide composition comprises a combination of six or more provided oligonucleotide types. In some embodiments, a provided chirally controlled oligonucleotide composition comprises a combination of seven or more provided oligonucleotide types. In some embodiments, a provided chirally controlled oligonucleotide composition comprises a combination of eight or more provided oligonucleotide types. In some embodiments, a provided chirally controlled oligonucleotide composition comprises a combination of nine or more provided oligonucleotide types. In some embodiments, a provided chirally controlled oligonucleotide composition comprises a combination of ten or more provided oligonucleotide types. In some embodiments, a provided chirally controlled oligonucleotide composition comprises a combination of fifteen or more provided oligonucleotide types.

[1396] In some embodiments, a provided chirally controlled oligonucleotide composition is a combination of an amount of chirally uniform mipomersen of the Rp configuration and an amount of chirally uniform mipomersen of the Sp configuration.

[1397] In some embodiments, a provided chirally controlled oligonucleotide composition is a combination of an amount of chirally uniform mipomersen of the Rp configuration, an amount of chirally uniform mipomersen of the Sp configuration, and an amount of one or more chirally pure mipomersen of a desired diastereomeric form.

[1398] In some embodiments, a provided oligonucleotide type is selected from those described in WO/2014/012081 and WO/2015/107425, the oligonucleotides, oligonucleotide types, oligonucleotide compositions, and methods thereof of each of which are incorporated herein by reference. In some embodiments, a provided chirally controlled oligonucleotide composition comprises oligonucleotides of an oligonucleotide type selected from those described in WO/2014/012081 and WO/2015/107425.

### Incorporation of Lipids

[1399] Lipids can be incorporated into provided technologies through many types of methods in accordance with the present disclosure. In some embodiments, lipids are physically mixed with provided oligonucleotides to form provided compositions. In some embodiments, lipids are chemically conjugated with oligonucleotides.

[1400] In some embodiments, provided compositions comprise two or more lipids. In some embodiments, provided oligonucleotides comprise two or more conjugated lipids. In some embodiments, the two or more conjugated lipids are the same. In some embodiments, the two or more conjugated lipids are different. In some embodiments, provided oligonucleotides comprise no more than one lipid. In some embodiments, oligonucleotides of a provided composition comprise different types of conjugated lipids. In some embodiments, oligonucleotides of a provided composition comprise the same type of lipids.

[1401] Lipids can be conjugated to biologically active agents, e.g., oligonucleotides optionally through linkers. Various types of linkers in the art can be utilized in accordance of the present disclosure. In some embodiments, a linker comprise a phosphate group, which can, for example, be used for conjugating lipids through chemistry similar to those employed in oligonucleotide synthesis. In some embodiments, a linker comprises an amide, ester, or ether group. In some embodiments, a linker has the structure of -L^{LD}-. In some embodiments, a linker has the structure of -L-. In some embodiments, after conjugation to oligonucleotides, a lipid forms a moiety having the structure of -L^{LD}-R^{LD}, wherein each of L^{LD} and R^{LD} is independently as defined and described herein. In some embodiments, after conjugation to oligonucleotides, a lipid forms a moiety having the structure of -L-R^{LD}, wherein each of L and R^{LD} is independently as defined and described herein.

[1402] In some embodiments, -L- comprises a bivalent aliphatic chain. In some embodiments, -L- comprises a phosphate group. In some embodiments, -L- comprises a phosphorothioate group. In some embodiments, -L- has the structure of —C(O)NH—(CH₂)₆—OP(═O)(S)—.

[1403] Lipids, optionally through linkers, can be conjugated to oligonucleotides at various suitable locations. In some embodiments, lipids are conjugated through the 5′-OH group. In some embodiments, lipids are conjugated through the 3′-OH group. In some embodiments, lipids are conjugated through one or more sugar moieties. In some embodiments, lipids are conjugated through one or more bases. In some embodiments, lipids are incorporated through one or more internucleotidic linkages. In some embodiments, an oligonucleotide may contain multiple conjugated lipids which are independently conjugated through its 5′-OH, 3′-OH, sugar moieties, base moieties and/or internucleotidic linkages.

[1404] As demonstrated in the present disclosure, conjugations of lipids with oligonucleotides can surprising improve properties of the oligonucleotides, such as safety, activity, delivery, etc.

### Certain Biological Applications and Use

[1405] As described herein, provided compositions and methods are capable of altering splicing of transcripts. In some embodiments, provided compositions and methods provide improved splicing patterns of transcripts compared to a reference pattern, which is a pattern from a reference condition selected from the group consisting of absence of the composition, presence of a reference composition, and combinations thereof. An improvement can be an improvement of any desired biological functions. In some embodiments, for example, in DMD, an improvement is production of an mRNA from which a dystrophin protein with improved biological activities is produced. In some other embodiments, for example, an improvement is down-regulation of STAT3, HNRNPH1 and/or KDR to mitigate tumor progression, malignancy, and angiogenesis through forced splicing-induced nonsense-mediated decay (DSD-NMD).

[1406] In some embodiments, the present disclosure provides a method for altering splicing of a target transcript, comprising administering a composition comprising a first plurality of oligonucleotides, wherein the splicing of the target transcript is altered relative to reference conditions selected from the group consisting of absence of the composition, presence of a reference composition, and combinations thereof.

[1407] In some embodiments, the present disclosure provides a method of generating a set of spliced products from a target transcript, the method comprising steps of:

[1408] contacting a splicing system containing the target transcript with a provided composition, in an amount, for a time, and under conditions sufficient for a set of spliced products to be generated that is different from a set generated under reference conditions selected from the group consisting of absence of the lipids in the provided composition, the composition, presence of a reference composition, and combinations thereof.

[1409] As widely known in the art, many diseases and/or conditions are associated with transcript splicing. For examples, see Garcia-Blanco, et al., Alternative splicing in disease and therapy, Nat Biotechnol. 2004 May; 22(5):535-46; Wang, et al., Splicing in disease: disruption of the splicing code and the decoding machinery, Nat Rev Genet. 2007 October; 8(10):749-61; Havens, et al., Targeting RNA splicing for disease therapy, Wiley Interdiscip Rev RNA. 2013 May-June; 4(3):247-66; Perez, et al., Antisense mediated splicing modulation for inherited metabolic diseases: challenges for delivery, Nucleic Acid Ther. 2014 February; 24(1):48-56; etc. Additional example targets and/or disease are described in Xiong, et al., The human splicing code reveals new insights into the genetic determinants of disease, Science. 2015 Jan. 9; 347(6218):1254806. doi: 10.1126/science.1254806. In some embodiments, the present disclosure provides compositions and methods for treating or preventing diseases, including but not limited to those described in references cited in this disclosure.

[1410] In some embodiments, the present disclosure provides a method for treating or preventing a disease, comprising administering to a subject an oligonucleotide composition described herein.

[1411] In some embodiments, the present disclosure provides a method for treating or preventing a disease, comprising administering to a subject a provided oligonucleotide composition comprising a lipid and a first plurality of oligonucleotides to which the lipid is conjugated, which oligonucleotides:
[1412] 1) have a common base sequence complementary to a target sequence in a transcript; and
[1413] 2) comprise one or more modified sugar moieties and modified internucleotidic linkages,
[1414] the oligonucleotide composition being characterized in that, when it is contacted with the transcript in a transcript splicing system, splicing of the transcript is altered relative to that observed under reference conditions selected from the group consisting of absence of the lipid, absence of the the composition, presence of a reference composition, and combinations thereof.

[1415] In some embodiments, the present disclosure provides a method for treating or preventing a disease, comprising administering to a subject an oligonucleotide composition comprising a lipid and a first plurality of oligonucleotides of a particular oligonucleotide type defined by:
[1416] 1) base sequence;
[1417] 2) pattern of backbone linkages;
[1418] 3) pattern of backbone chiral centers; and
[1419] 4) pattern of backbone phosphorus modifications,
   which composition is chirally controlled in that it is enriched, relative to a substantially racemic preparation of oligonucleotides having the same base sequence, for oligonucleotides of the particular oligonucleotide type, wherein:
[1420] the lipid is conjugated to one or more oligonucleotides of the first plurality; and
[1421] the oligonucleotide composition being characterized in that, when it is contacted with the transcript in a transcript splicing system, splicing of the transcript is altered relative to that observed under reference conditions selected from the group consisting of absence of the composition, presence of a reference composition, and combinations thereof.

[1422] In some embodiments, a disease is one in which, after administering a provided composition, one or more spliced transcripts repair, restore or introduce a new beneficial function. For example, in DMD, after skipping one or more exons, functions of dystrophin can be restored, or partially restored, through a truncated but (partially) active version. Other examples include but are not limited to those listed in Table ES1, ES2, or ES3. In some embodiments, a target is one listed in Table ES3 with “Correction of Aberrant Splicing”.

[1423] In some embodiments, a disease is one in which, after administering a provided composition, one or more spliced transcripts repair, a gene is effectively knockdown by altering splicing of the gene transcript. Examples include but are not limited to those listed in Table ES1, ES2, or ES3. In some embodiments, a target is one listed in Table ES3 with “Knockdown of Detrimental Gene Expression”.

[1424] In some embodiments, a disease is Duchenne muscular dystrophy. In some embodiments, a disease is spinal muscular atrophy. In some embodiments, a disease is cancer.

[1425] In some embodiments, the present disclosure provides a method of treating a disease by administering a composition comprising a first plurality of oligonucleotides sharing a common base sequence comprising a common base sequence, which nucleotide sequence is complementary to a target sequence in the target transcript,

[1426] the improvement that comprises using as the oligonucleotide composition a stereocontrolled oligonucleotide composition characterized in that 1) a lipid is conjugated to one or more oligonucleotides of the stereocontrolled oligonucleotide composition; and 2) when it is contacted with the transcript in a transcript splicing system, splicing of the transcript is altered relative to that observed under reference conditions selected from the group consisting of absence of the composition, presence of a reference composition, and combinations thereof.

[1427] In some embodiments, the present disclosure provides a method of treating a disease by administering a composition comprising a first plurality of oligonucleotides sharing a common base sequence comprising a common base sequence, which nucleotide sequence is complementary to a target sequence in the target transcript,

[1428] the improvement that comprises using as the oligonucleotide composition a stereocontrolled oligonucleotide composition characterized in that, 1) a lipid is conjugated to one or more oligonucleotides of the stereocontrolled oligonucleotide composition; and 2) when it is contacted with the transcript in a transcript splicing system, splicing of the transcript is altered relative to that observed under reference conditions selected from the group consisting of absence of the composition, presence of a reference composition, and combinations thereof.

[1429] In some embodiments, sequence of provide oligonucleotides is or comprises an element that is substantially complementary to a targeted element in a cellular nucleic acid. In some embodiments, a sequence is or comprises a sequence element that is associated with a muscle disease, disorder or condition. In some embodiments, a cellular nucleic acid is or comprises a transcript. In some embodiments, a cellular nucleic acid is or comprises a primary transcript. In some embodiments, a cellular nucleic acid is RNA. In some embodiments, a cellular nucleic acid is pre-mRNA. In some embodiments, a cellular nucleic acid is mRNA. In some embodiments, a cellular nucleic acid is or comprises genomic nucleic acid. In some embodiments, a sequence is or comprises an element that is substantially complementary to a targeted an RNA, and provided oligonucleotides of the sequence provide exon-skipping to form mRNA which are translated into proteins that have improved functions than proteins formed absence of the provided oligonucleotides. In some embodiments, such proteins with improved activities can restore or partially restore one or more muscular functions and can be used for treatment of muscle diseases, disorders and/or conditions.

[1430] In some embodiments, a common sequence of a plurality of oligonucleotides comprises a sequence selected from Table. In some embodiments, a common sequence is a sequence selected from Table ES1. In some embodiments, a common sequence is a sequence found is a transcript of any of the genes selected from Table ES1, ES2, and ES3.

[1431] Example diseases that can be treated include but are not limited to those described in Tables ES2 and ES3. In some embodiments, a disease is Duchenne muscular dystrophy. In some embodiments, a disease is spinal muscular atrophy. In some embodiments, a disease is cancer.

[1432] For Duchenne muscular dystrophy, example mutations and/or suitable DMD exons for skipping are widely known in the art, including but not limited to those described in U.S. Pat. Nos. 8,759,507, 8,486,907, and reference cited therein. In some embodiments, one or more skipped exons are selected from exon 2, 29, 40, 41, 42, 43, 44, 45, 46, 47, 48, 49, 50, 51 and 53. In some embodiments, exon 2 of DMD is skipped. In some embodiments, exon 29 of DMD is skipped. In some embodiments, exon 40 of DMD is skipped. In some embodiments, exon 41 of DMD is skipped. In some embodiments, exon 42 of DMD is skipped. In some embodiments, exon 43 of DMD is skipped. In some embodiments, exon 44 of DMD is skipped. In some embodiments, exon 45 of DMD is skipped. In some embodiments, exon 46 of DMD is skipped. In some embodiments, exon 47 of DMD is skipped. In some embodiments, exon 48 of DMD is skipped. In some embodiments, exon 49 of DMD is skipped. In some embodiments, exon 50 of DMD is skipped. In some embodiments, exon 51 of DMD is skipped. In some embodiments, exon 53 of DMD is skipped. In some embodiments, a skipped exon is any exon whose inclusion decreases a desired function of DMD. In some embodiments, a skipped exon is any exon whose skipping increased a desired function of DMD.

[1433] In some embodiments, for exon skipping of DMD transcript, or for treatment of DMD, a sequence of a provided plurality of oligonucleotides comprises a DMD sequence selected from Table ES1. In some embodiments, a sequence comprises one of SEQ ID Nos 1-30 of U.S. Pat. No. 8,759,507. In some embodiments, a sequence comprises one of SEQ ID Nos 1-211 of U.S. Pat. No. 8,486,907. In some embodiments, for exon skipping of DMD transcript, or for treatment of DMD, a sequence of a provided plurality of oligonucleotides is a DMD sequence selected from Table ES1. In some embodiments, a sequence is one of SEQ ID Nos 1-30 of U.S. Pat. No. 8,759,507. In some embodiments, a sequence is one of SEQ ID Nos 1-211 of U.S. Pat. No. 8,486,907. In some embodiments, a sequence comprises UCAAGGAAGAUGGCAUUUCU (SEQ ID NO: 1). In some embodiments, a sequence is UCAAGGAAGAUGGCAUUUCU (SEQ ID NO: 1). In some embodiments, a sequence comprises CTCCAACATCAAGGAAGATGGCATTTCTAG (SEQ ID NO: 9). In some embodiments, a sequence is CTCCAACATCAAGGAAGATGGCATTTCTAG (SEQ ID NO: 9). In some embodiments, a sequence is selected from Table 4A. In some embodiments, a sequence is one described in Kemaladewi, et al., Dual exon skipping in myostatin and dystrophin for Duchenne muscular dystrophy, BMC Med Genomics. 2011 Apr. 20; 4:36. doi: 10.1186/1755-8794-4-36; or Malerba et al., Dual Myostatin and Dystrophin Exon Skipping by Morpholino Nucleic Acid Oligomers Conjugated to a Cell-penetrating Peptide Is a Promising Therapeutic Strategy for the Treatment of Duchenne Muscular Dystrophy, Mol Ther Nucleic Acids. 2012 Dec. 18; 1:e62. doi: 10.1038/mtna.2012.54.

[1434] In some embodiments, a disease treatment comprises knockdown of a gene function by altering its transcript splicing. Example disease and target genes include but are not limited to those listed in Table ES3, particularly those with labeled with “Knockdown of Detrimental Gene Expression”.

TABLE ES1
Example sequences (SEQ ID NOS 10-204,
respectively, in order of columns).

cccauuuugugaauguuuucuuuu
uuguguauuuacccauuuugug
Uauccucugaaugucgcauc
gguuauccucugaaugucgu
Gagccuuuuuucuucuuug
Uccuuucgucucugggcuc
Cuccucuuucuucuucugc
Cuucgaaacugagcaaauuu
cuugugagacaUgagug
cagagacuccucuugcuu
ugcugcugucuucuugcu
Uuguuaacuuuuucccauu
cgccgccauuucucaacag
TAGATAGCTATATAT
ATAGATAGCTATATA
TATAGATAGCTATAT
ATATAGATAGCTATA
GATATAGATAGCTAT
ATAGATAGCTAT
AGATATAGATAGCTA
TATAGATAGCTA
TAGATATAGATAGCT
ATATAGATAGCT
ATAGATATAGATAGC
GATATAGATAGC
TATAGATATAGATAG
AGATATAGATAG
ATATAGATATAGATA
TAGATATAGATA
TATATAGATATAGAT
ATAGATATAGAT
TATAGATATAGA
ATATAGATATAG
ATAGCTATATAGATA
AAAAAATAGCTATAT
GTTAAAAAAAATAGC
AGGAAGTTAAAAAAA
AATAAAGGAAGTTAA
AGGAAAATAAAGGAA
GTGTAAGGAAAATAA
ATTTTGTCTAAAACC
GATTTTGTCTAAAAC
TTTTGTCTAAAA
TGATTTTGTCTAAAA
ATTTTGTCTAAA
TTGATTTTGTCTAAA
GATTTTTGTCTAA
TTTGATTTTGTCTAA
TTTTGATTTTGTCTAA
TTTTGATTTTGTCTA
TGATTTTGTCTA
TTGATTTTGTCT
TTTTTGATTTTGTCT
TTTGATTTTGTC
CTTTTTGATTTTGTC
TTTTGATTTTGT
TTTTTGATTTTG
CTTCTTTTTGATTTT
CTTTTTGATTTT
TCTTTTTGATTT
CCTTCCTTCTTTTTG
GAGCACCTTCCTTCT
AATGTGAGCACCTTC
TAAGGAATGTGAGCA
AATTTAAGGAATGTGAGC
TTAAGGAATGTGAGC
TAATTTAAGGAATGTGAG
TTTAAGGAATGTGAG
AAGGAATGTGAG
TTAATTTAAGGAATGTGA
ATTTAAGGAATGTGA
TAAGGAATGTGA
CTTAATTTAAGGAATGTG
AATTTAAGGAATGTG
TTAAGGAATGTG
TAATTTAAGGAATGT
CCTTAATTTAAGGAATGT
TTTAAGGAATGT
TTAATTTAAGGAATG
ATTTAAGGAATG
CTTAATTTAAGGAAT
AATTTAAGGAAT
CCTTAATTTAAGGAA
TAATTTAAGGAA
TCCTTAATTTAAGGA
TTAATTTAAGGA
CTTAATTTAAGG
CCTTAATTTAAG
TGCTGGCAGACTTAC
CATAATGCTGGCAGA
TCATAATGCTGGCAG
TTCATAATGCTGGCA
TTTCATAATGCTGGC
ATTCACTTTCATAATGCTGG
CTTTCATAATGCTGG
TCATAATGCTGG
ACTTTCATAATGCTG
TTCATAATGCTG
CACTTTCATAATGCT
TTTCATAATGCT
TCACTTTCATAATGC
GTTTCATAATGC
TTCACTTTCATAATG
ACTTTCATAATG
ATTCACTTTCATAAT
CACTTTCATAAT
GATTCACTTTCATAA
TCACTTTCATAA
TTCACTTTCATA
ATTCACTTTCAT
AGTAAGATTCACTTT
ACAAAAGTAAGATTC
GTTTTACAAAAGTAA
ATAAAGTTTTACAAA
AAACCATAAAGTTTT
TCCACAAACCATAAA
ATT CAC TTT CAT AAT GCT GG
ATT CAC TTT CAT AAT GCT GG
ATT CAC TTT CAT AAT GCT GG
ATT CAC TTT CAT AAT GCT GG
ATT CAC TTT CAT AAT GCT GG
ATT CAC TTT CAT AAT GCT GG
ATT CAC TTT CAT AAT GCT GG
ATT CAC TTT CAT AAT GCT GG
CAC TTT CAT AAT GCT GG
CAC TTT CAT AAT GCT GG
CAC TTT CAT AAT GCT GG
CAC TTT CAT AAT GCT GG
CAC TTT CAT AAT GCT GG
CAC TTT CAT AAT GCT GG
CAC TTT CAT AAT GCT GG
CAC TTT CAT AAT GCT GG
CAC TTT CAT AAT GCT GG
CAC TTT CAT AAT GCT GG
TTT CAT AAT GCT GG
TTT CAT AAT GCT GG
TTT CAT AAT GCT GG
TTT CAT AAT GCT GG
TTT CAT AAT GCT GG
TTT CAT AAT GCT GG
TTT CAT AAT GCT GG
AAT GCT GGC AG
AAT GCT GGC AG
AAT GCT GGC AG
AAT GCT GGC AG
AAT GCT GGC AG
AAT GCT GGC AG
AAT GCT GGC AG
GCT GGC AG
GCT GGC AG
GCT GGC AG
GCT GGC AG
GCT GGC AG
GCT GGC AG
GCT GGC AG
GCT GGC AG
GCT GGC AG
C TAG TAT TTC CTG CAA ATG AG
C TAG TAT TTC CTG CAA ATG AG
C TAG TAT TTC CTG CAA ATG AG
C TAG TAT TTC CTG CAA ATG AG
C TAG TAT TTC CTG CAA ATG AG
C TAG TAT TTC CTG CAA ATG AG
C TAG TAT TTC CTG CAA ATG AG
C TAG TAT TTC CTG CAA ATG AG
C TAG TAT TTC CTG CAA ATG AG
C TAG TAT TTC CTG CAA ATG AG
C TAG TAT TTC CTG CAA ATG AG
C CAG CAT TTC CTG CAA ATG AG
C CAG CAT TTC CTG CAA ATG AG
C CAG CAT TTC CTG CAA ATG AG
C CAG CAT TTC CTG CAA ATG AG
C CAG CAT TTC CTG CAA ATG AG
C CAG CAT TTC CTG CAA ATG AG
C CAG CAT TTC CTG CAA ATG AG
C CAG CAT TTC CTG CAA ATG AG
C CAG CAT TTC CTG CAA ATG AG
A TGC CAG CAT TTC CTG CAA ATG AGA
A TGC CAG CAT TTC CTG CAA ATG AGA
A TGC CAG CAT TTC CTG CAA ATG AGA
A TGC CAG CAT TTC CTG CAA ATG AGA
A TGC CAG CAT TTC CTG CAA ATG AGA
A TGC CAG CAT TTC CTG CAA ATG AGA
A TGC CAG CAT TTC CTG CAA ATG AGA
A TGC CAG CAT TTC CTG CAA ATG AGA
GCT CTA TGC CAG CAT TTC CTG CAA A
GCT CTA TGC CAG CAT TTC CTG CAA A
GCT CTA TGC CAG CAT TTC CTG CAA A
GCT CTA TGC CAG CAT TTC CTG CAA A
GCT CTA TGC CAG CAT TTC CTG CAA A
GCT CTA TGC CAG CAT TTC CTG CAA A
GCT CTA TGC CAG CAT TTC CTG CAA A
GCT CTA TGC CAG CAT TTC CTG CAA A
GCT CTA TGC CAG CAT TTC CTG CAA A
GCT CTA TGC CAG CAT TTC CTG CAA A

SEQ ID Nos 1-30 of U.S. Pat. No. 8,759,507;
SEQ ID Nos 1-211 of U.S. Pat. No. U.S. Pat. No. 8,486,907;

TABLE ES2

| | | | | | | | |
|---|---|---|---|---|---|---|---|
| | | | | | Repeat | | |
| | | | Parent of | Repeat | number | Repeat | |
| | | | origin of | number | (pre- | number | Somatic |
| Disease | Sequence | Location | expansion | (normal) | mutation) | (disease) | instability |

Diseases with coding TNRs

| | | | | | | | |
|---|---|---|---|---|---|---|---|
| DRPLA | CAG | ATN1 (exon 5) | P | 6-35 | 35-48 | 49-88 | Yes |
| HD | CAG | HTT (exon 1) | P | 6-29 | 29-37 | 38-180 | Yes |
| OPMD | GCN | PABPN1 (exon | P and M | 10 | 12-17 | >11 | None found in |
| | | 1) | | | | | tissue tested |
| | | | | | | | (hypothalamus) |
| SCA1 | CAG | ATXN1 (exon | P | 6-39 | 40 | 41-83 | Yes |
| | | 8) | | | | | |
| SCA2 | CAG | ATXN2 (exon | P | <31 | 31-32 | 32-200 | Unknown |
| | | 1) | | | | | |
| SCA3 | CAG | ATXN3 (exon | P | 12-40 | 41-85 | 52-86 | Unknown |
| (Machado- | | 8) | | | | | |
| Joseph | | | | | | | |
| disease) | | | | | | | |
| SCA6 | CAG | CACNA1A(exon | P | <18 | 19 | 20-33 | None found |
| | | 47) | | | | | |
| SCA7 | CAG | ATXN7 (exon | P | 4-17 | 28-33 | >36 | Yes |
| | | 3) | | | | to >460 | |
| SCA17 | CAG | TBP (exon 3) | P > M | 25-42 | 43-48 | 45-66 | Yes |
| SMBA | CAG | AR (exon 1) | P | 13-31 | 32-39 | 40 | None found |

Diseases with non-coding TNRs

| | | | | | | | |
|---|---|---|---|---|---|---|---|
| DM1 | CTG | DMPK (3′ UTR) | M | 5-37 | 37-50 | <50 | Yes |
| DM2 | CCTG | CNBP (intron | Uncertain | <30 | 31-74 | 75-11,000 | Yes |
| | | 1) | | | | | |
| FRAX-E | GCC | AFF2 (5′ UTR) | M | 4-39 | 40-200 | >200 | Unknown |
| FRDA | GAA | FXN (intron 1) | Recessive | 5-30 | 31-100 | 70-1,000 | Yes |
| FXS | CGG | FMR1 (5′ UTR) | M | 6-50 | 55-200 | 200-4,000 | Yes |
| HDL2 | CTG | JPH3 (exon 2A) | M | 6-27 | 29-35 | 36-57 | Unknown |
| SCA8 | CTG | ATXN8OS (3′ | M | 15-34 | 34-89 | 89-250 | Unknown |
| | | UTR) | | | | | |
| SCA10 | ATTCT | ATXN10 (intron | M and P | 10-29 | 29-400 | 400-4,500 | Yes |
| | | 9) | (smaller | | | | |
| | | | changes | | | | |
| | | | with M) | | | | |
| SCA12 | CAG | PPP2R2B (5′ | M and P | 7-28 | 28-66 | 66-78 | None found |
| | | UTR) | (more | | | | |
| | | | unstable | | | | |
| | | | with P) | | | | |

AFF2, AF4/FMR2 family, member 2;
AR, androgen receptor;
ATN1, atrophin 1;
ATXN, ataxin;
ATXN8OS, ATXN8 opposite strand (non-protein coding);
CACNA1A, calcium channel, voltage-dependent, P/Q type, alpha 1A subunit;
CNBP, CCHC-type zinc finger nucleic acid binding protein;
DM, myotonic dystrophy;
DMPK, dystrophia myotonica-protein kinase;
DRPLA, dentatorubral-pallidoluysian atrophy;
FMR1, fragile × mental retardation 1;
FRAX-E, mental retardation, X-linked, associated with FRAXE;
FRDA, Friedreich's ataxia;
FXN, frataxin;
FXS, fragile × syndrome;
FXTAS, fragile X-associated tremor/ataxia syndrome;
HD, Huntington's disease;
HDL2, Huntington's disease-like 2;
HTT, huntingtin;
JPH3, junctophilin 3;
M, maternal;
OPMD, oculopharyngeal muscular dystrophy;
P, paternal;
PABPN1, poly(A) binding protein nuclear 1;
PPP2R2B, protein phosphatase 2, regulatory subunit B;
SCA, spinocerebellar ataxia;
SMBA, spinomuscular bulbar atrophy;
TBP, TATA-box binding protein;
TNR, trinucleotide repeat.

TABLE ES3

| | | | |
|---|---|---|---|
| | | Ataxia telangiectasia | ATM |
| | | β-Thalassemia | HBB |
| | | Cancer | BRCA2 |
| | | CDG1A² | PMM2 |
| | | Congenital adrenal insufficiency | CYP11A |
| | | Cystic librosis | CFTR |
| Bardet-Biedi syndrome | BBS1 | Duchenne muscular dystrophy | DMD |
| β-Thalassemia | HBB | Fukuyama congenital muscular dystrophy (FCMD) | FKTN |
| Cancer | BRCA1 | Growth hormone insensitivity | GHR |
| | PTCH1 | HPABH4A² | PTS |
| Cystic fibrosis | CFTR | Hutchinson-Gilford progeria (HGPS) | LMNA |
| Duchenne muscular dystrophy | DMD | MLC1² | MLC1 |
| Factor VII deficiency | F7 | Methylmalonic aciduria | MUT |
| Familial dysautonomia | IKBKAP | Myopathy with lactic acidosis | ISCU |
| Fanconi anemia | FANCC | Myotonic dystrophy | CLC1 |
| Hemophilla A | F9 | Neurofibromatosis | NF1 |
| Propionic acidernia | PCCA | Niemann-Pick type C | NPC1 |
| Retinitis pigmentosa | RHO | Propionic acidemia | PCCB |
| | RPGR | Usher syndrome | USH1C |
| | | Alzheimer's disease/FTDP-17 Taupathies | MAPT |
| | | Cancer | BCL2L1 |
| | | | FGFR1 |
| | | | MCL1 |
| | | | MDM2 |
| Afibrinogenemia | FGB | | Multiple |
| Cancer | BRCA1 | | PKM |
| Propionic acidemia | PCCA | | MST1R |
| Neurofibromatosis | NF1 | | USP5 |
| Ocular albinism type 1 | GRP143 | Spinal muscular atrophy | SMN2 |
| Alzheimer's disease | BACE1 | | |
| Cancer | CDKN1A | | |
| | ERBB2 | | |
| | FLT1 | | |
| | HNRNPH1 | | |
| | KDR | | |
| | MYC | | |
| | Multiple | | |
| | PHB | | |
| | SRA1 | | |
| | STAT3 | | |
| | TERT | | |
| | WT1 | Duchenne muscular dystrophy | DMD |
| FHBL/atherosclerosis² | APOB | | |
| Immune-response | CD40 | | |
| Inflammatory disease | TNFRSF1B | | |
| | IL5RA | | |
| Influenza virus | TMPRSS2 | Dystrophic epidermolysis bullosa | COL7A1 |
| Muscle wasting diseases | MSTN | | |
| Spinocerebellar ataxia type 1 | ATXN1 | Mlyoshi myopathy | DYSF |

| | | | | |
|---|---|---|---|---|
| Gene | Effect | Disease | Variant location | Effect on splicing/protein |

Modifies disease phenotype

| | | | | |
|---|---|---|---|---|
| CFTR | cis | Cystic fibrosis | (TG)n and Tn polymorphisms in CFTR | Affects the amount of exon 9 skipping |
| | | | intron 8 | |
| MCAD | cis | Medium-chain acyl- | ESS within exon 5 | Prevents effect of disease-causing |
| | | CoA dehydrogenase | | ESE mutation |
| | | deficiency | | |
| SCN1A | cis | Susceptibility to anti- | 5′ splice site of neonatal alternative exon | Increased use of neonatal alternative |
| | | epileptics | | exon |
| CFTR | cis and | Cystic fibrosis | Point mutation in intron 19 creates a | Variable level of cryptic exon inclusion |
| | trans | | variably spliced 84-nucleotide exon | influences severity |
| IKBKAP | trans | Familial | n/a | Tissue-specific differences in |
| | | dysautonomia | | recognition of mutant 5′ splice site |
| Scn8a | cis and | Neurological disorder | 4-bp deletion within the 5′-splice site of | 5′ splice-site mutation modified by |
| | trans | (mouse) | exon 3 | Scnm1 |

Linked with disease susceptibility

| | | | | |
|---|---|---|---|---|
| IRF5 | cis | Systemic lupus | One SNP between alternative promoters | SNP creates 5′ splice site and new |
| | | erythematosus (SLE) | creates 5′ splice site | first exon |
| CTLA4 | cis | Autoimmune diseases | Two SNPs in 3′ UTR (exon 4) | Increased exon 3 skipping; reduced |
| | | | | soluble isoform |
| NCAM1 | cis | Bipolar disorder | Two SNPs, one within cluster of alternative | Decreased expression of secreted |
| | | | exons | splice variants |
| ERBB4 | cis | Schizophrenia | One SNP in intron 12 and SNPs near exon | Increased use of exons 16 and 26 |
| | | | 3 linked with splicing of exons 16 and 26, | |
| | | | respectively | |
| OLR1 | cis | Myocardial infarction | Six SNPs; three in intron 4, two in intron 5, | Exon 5 skipping results in an isoform |
| | | | one in the 3′ UTR in exon 6 | with reduced apoptotic effects |
| OAS1 | cis | TypeI diabetes | Intron 6 AG→AA variant shifts 3′ splice | SNP moves splice site by 1 nucleotide |
| | | | site by 1 nucleotide, changing the | resulting in a longer protein |
| | | | reading frame | |
| TNNT2 | cis | Cardiac hypertrophy | 5-bp deletion affects intron 3 splice site | Results in E4 skipping (minigene |
| | | | | analysis) |
| GPRA | cis | Asthma | Three SNPs distal to alternative site | Increased use of the more distal of |
| | | | | two terminal exons |
| MAPT | cis | Tauopathies | 238-bp insertion into intron 9 | Enhanced exon 10 inclusion |
| PTPRC | cis | Altered immune | A138G polymorphism exon 6 | Enhanced exon 6 skipping |
| (CD45) | | function | | |
| PTPRC | cis | Multiple sclerosis | C77G polymorphism exon 4 | Enhanced exon 4 inclusion |
| (CD45) | | | | |
| LDLR | cis | Elevated cholesterol | C688T polymorphism exon 12 | Enhanced exon 12 skipping |
| SFRS8 | trans | Asthma | n/a | None reported |

| Splicing factor^{a} | OMIM number^{b} | Disease association^{c} |
|---|---|---|
| CUG triplet repeat, RNA-binding protein 1; | 601074 | Myotonic dystrophy (DM) |
| CUGBP1 (CUGBP; NAB50; BRUNOL2) | | |
| CUG triplet repeat, RNA-binding protein 2; | 602538 | Myotonic dystrophy (DM) |
| CUGBP2 (ETR3) | | |
| FUS-interacting protein I; FUSIP1 | 605221 | Leukemias and sarcomas |
| (TASR(1 or 2); SRp38; SRRp40; NSSR) | | |
| Fusion, derived from 12-16 translocation, | 137070 | Liposarcomas, acute myeloid |
| malignant liposarcoma; FUS (TLS) | | leukemia (AML) |
| Glycogen synthase kinase 3-BETA; | 605004 | Alzheimer disease (AD) |
| GSK3B (GSK-3β) | | |
| Hydroxymethylglutaryl coenzyme A1a | 600701 | Alzheimer disease (AD) |
| (HMGA1a) (HMG-I) | | |
| Muscleblind-like protein 1; MBNL1 | 606516 | Myotonic dystrophy (DM) |
| (MBNL) | | |
| Muscleblind-like protein 2; MBNL2 (MBLL) | 607327 | Myotonic dystrophy (DM) |
| Muscleblind-like protein 3; MBNL3 (MBXL) | 300413 | Myotonic dystrophy (DM) |
| Neurooncologic ventral antigen 1; NOVA1 | 602157 | Paraneoplastic syndrome |
| (Ri Ag) | | |
| Precursor mRNA-processing factor 3, | 607301 | Retinitis pigmentosa |
| Saccharomyces cerevisiae, homolog of | | |
| PRPF3 (PRP3; HPRP3) | | |
| Precursor mRNA-processing factor 31, | 606419 | Retinitis pigmentosa |
| S. cerevisiae, homolog of PRPF31 | | |
| (PRP31) | | |
| Precursor mRNA-processing factor 8, | 607300 | Retinitis pigmentosa |
| S. cerevisiae, homolog of PRPF8 (PRP8 | | |
| PRPC8 U5 snRNP-specific protein, | | |
| 220-K; p220) | | |
| RNA-binding motif protein, Y chromosome | 400006 | Azospermia |
| family 1, member A1; RBMY1A1 | | |
| (RBMY; RBM1; RBM2; YRRM1; YRRM2) | | |
| Splicing factor HCC1 (HCC1.3; HCC1.4) | 604739 | Hepatocellular carcinoma |
| Splicing factor, proline- and glutamine-rich | 605199 | Papillary renal cell |
| SFPQ (PSF) | | carcinoma |
| Survival of motor neuron 1, telomeric: | 600354 | Spinal muscular atrophy |
| SMN1 (SMN; SMNT; T-BCD541) | | |
| Survival of motor neuron 2, centromeric, | 601627 | Spinal muscular atrophy |
| SMN2 (SMNC; C-BCD541) | | |
| Tumor protein p73-like: TP73L p(63) | 603273 | Hay-Wells syndrome |

| | Human | | Therapeutic | |
|---|---|---|---|---|
| Disease | Target Gene | Gene Defects | modality | Approaches |
| Cancer | BRCA1 | Splice Site | ASO | Correction of |
| | | Mutations | | Aberrant |
| | | | | Splicing |
| Cancer | PTCH1 | Splice Site | ASO | Correction of |
| | | Mutations | | Aberrant |
| | | | | Splicing |
| Duchenne muscular | DMD | Splice Site | ASO | Correction of |
| dystrophy | | Mutations | | Aberrant |
| | | | | Splicing |
| Ataxia telangiectasia | ATM | Cryptic Splice | ASO | Correction of |
| | | Sites | | Aberrant |
| | | | | Splicing |
| Beta-thalassemia | HBB | Cryptic Splice | ASO | Correction of |
| | | Sites | | Aberrant |
| | | | | Splicing |
| Cancer | BRCA2 | Cryptic Splice | ASO | Correction of |
| | | Sites | | Aberrant |
| | | | | Splicing |
| CDG1A | PMM2 | Cryptic Splice | ASO | Correction of |
| | | Sites | | Aberrant |
| | | | | Splicing |
| Congenital adrenal | CYP11A | Cryptic Splice | ASO | Correction of |
| insufficiency | | Sites | | Aberrant |
| | | | | Splicing |
| Cystic fibrosis | CFTR | Cryptic Splice | ASO | Correction of |
| | | Sites | | Aberrant |
| | | | | Splicing |
| Duchenne muscular | DMD | Cryptic Splice | ASO | Correction of |
| dystrophy | | Sites | | Aberrant |
| | | | | Splicing |
| Fukuyama congenital | FKTN | Cryptic Splice | ASO | Correction of |
| muscular dystrophy | | Sites | | Aberrant |
| (FCMD) | | | | Splicing |
| Growth hormone | GHR | Cryptic Splice | ASO | Correction of |
| insensitivity | | Sites | | Aberrant |
| | | | | Splicing |
| HPABH4A | PTS | Cryptic Splice | ASO | Correction of |
| | | Sites | | Aberrant |
| | | | | Splicing |
| Hutchinson-Gilford | LMNA | Cryptic Splice | ASO | Correction of |
| progeria (HGPS) | | Sites | | Aberrant |
| | | | | Splicing |
| MLC1 | MLC1 | Cryptic Splice | ASO | Correction of |
| | | Sites | | Aberrant |
| | | | | Splicing |
| Methylmalonic | MUT | Cryptic Splice | ASO | Correction of |
| aciduria | | Sites | | Aberrant |
| | | | | Splicing |
| Myopathy with lactic | ISCU | Cryptic Splice | ASO | Correction of |
| acidosis | | Sites | | Aberrant |
| | | | | Splicing |
| Myotonic dystrophy | CLC1 | Cryptic Splice | ASO | Correction of |
| | | Sites | | Aberrant |
| | | | | Splicing |
| Neurofibromatosis | NF1 | Cryptic Splice | ASO | Correction of |
| | | Sites | | Aberrant |
| | | | | Splicing |
| Niemann-Pick type C | NPC1 | Cryptic Splice | ASO | Correction of |
| | | Sites | | Aberrant |
| | | | | Splicing |
| Propionic acidemia | PCCB | Cryptic Splice | ASO | Correction of |
| | | Sites | | Aberrant |
| | | | | Splicing |
| Usher syndrome | USH1C | Cryptic Splice | ASO | Correction of |
| | | Sites | | Aberrant |
| | | | | Splicing |
| Afibrinogenemia | FGB | Regulatory | ASO | Correction of |
| | | Sequence | | Aberrant |
| | | Mutations | | Splicing |
| Cancer | BRCA1 | Regulatory | ASO | Correction of |
| | | Sequence | | Aberrant |
| | | Mutations | | Splicing |
| Propionic acidemia | PCCA | Regulatory | ASO | Correction of |
| | | Sequence | | Aberrant |
| | | Mutations | | Splicing |
| Ocular albinism type 1 | GRP143 | Regulatory | ASO | Correction of |
| | | Sequence | | Aberrant |
| | | Mutations | | Splicing |
| Alzheimer's | MAPT | Deregulated | ASO | Correction of |
| disease/FTDP-17 | | Alternative | | Aberrant |
| Taupathies | | Splicing | | Splicing |
| Cancer | BCL2L1 | Deregulated | ASO | Correction of |
| | | Alternative | | Aberrant |
| | | Splicing | | Splicing |
| Cancer | FGFR1 | Deregulated | ASO | Correction of |
| | | Alternative | | Aberrant |
| | | Splicing | | Splicing |
| Cancer | MCL1 | Deregulated | ASO | Correction of |
| | | Alternative | | Aberrant |
| | | Splicing | | Splicing |
| Cancer | MDM2 | Deregulated | ASO | Correction of |
| | | Alternative | | Aberrant |
| | | Splicing | | Splicing |
| Cancer | PKM | Deregulated | ASO | Correction of |
| | | Alternative | | Aberrant |
| | | Splicing | | Splicing |
| Cancer | MST1R | Deregulated | ASO | Correction of |
| | | Alternative | | Aberrant |
| | | Splicing | | Splicing |
| Cancer | USP5 | Deregulated | ASO | Correction of |
| | | Alternative | | Aberrant |
| | | Splicing | | Splicing |
| Spinal muscular | SMN2 | Deregulated | ASO | Correction of |
| atrophy | | Alternative | | Aberrant |
| | | Splicing | | Splicing |
| Alzheimer's disease | BACE1 | Detrimental | ASO | Knockdown of |
| | | Gene Expression | | Detrimental |
| | | | | Gene |
| | | | | Expression |
| Cancer | ERBB2 | Detrimental | ASO | Knockdown of |
| | | Gene Expression | | Detrimental |
| | | | | Gene |
| | | | | Expression |
| Cancer | FLT1 | Detrimental | ASO | Knockdown of |
| | | Gene Expression | | Detrimental |
| | | | | Gene |
| | | | | Expression |
| Cancer | HNRNPH1 | Detrimental | ASO | Knockdown of |
| | | Gene Expression | | Detrimental |
| | | | | Gene |
| | | | | Expression |
| Cancer | KDR | Detrimental | ASO | Knockdown of |
| | | Gene Expression | | Detrimental |
| | | | | Gene |
| | | | | Expression |
| Cancer | SRA1 | Detrimental | ASO | Knockdown of |
| | | Gene Expression | | Detrimental |
| | | | | Gene |
| | | | | Expression |
| Cancer | STAT3 | Detrimental | ASO | Knockdown of |
| | | Gene Expression | | Detrimental |
| | | | | Gene |
| | | | | Expression |
| Cancer | TERT | Detrimental | ASO | Knockdown of |
| | | Gene Expression | | Detrimental |
| | | | | Gene |
| | | | | Expression |
| Cancer | WT1 | Detrimental | ASO | Knockdown of |
| | | Gene Expression | | Detrimental |
| | | | | Gene |
| | | | | Expression |
| FHBL/atherosclerosis | APOB | Detrimental | ASO | Knockdown of |
| | | Gene Expression | | Detrimental |
| | | | | Gene |
| | | | | Expression |
| Immune-response | CD40 | Detrimental | ASO | Knockdown of |
| | | Gene Expression | | Detrimental |
| | | | | Gene |
| | | | | Expression |
| Inflammatory disease | TNFRSF1B | Detrimental | ASO | Knockdown of |
| | | Gene Expression | | Detrimental |
| | | | | Gene |
| | | | | Expression |
| Inflammatory disease | IL5RA | Detrimental | ASO | Knockdown of |
| | | Gene Expression | | Detrimental |
| | | | | Gene |
| | | | | Expression |
| Influenza virus | TMPRSS2 | Detrimental | ASO | Knockdown of |
| | | Gene Expression | | Detrimental |
| | | | | Gene |
| | | | | Expression |
| Muscle wasting | MSTN | Detrimental | ASO | Knockdown of |
| diseases | | Gene Expression | | Detrimental |
| | | | | Gene |
| | | | | Expression |
| Spinocerebellar | ATXN1 | Detrimental | ASO | Knockdown of |
| ataxia type 1 | | Gene Expression | | Detrimental |
| | | | | Gene |
| | | | | Expression |
| Duchenne muscular | DMD | RNA Reframing | ASO | RNA |
| dystrophy | | | | Reframing |
| Dystrophic | COL7A1 | RNA Reframing | ASO | RNA |
| epidermolysis bullosa | | | | Reframing |
| Miyoshi myopathy | DYSF | RNA Reframing | ASO | RNA |
| | | | | Reframing |

| | | |
|---|---|---|
| Beta-thalassemia | HBB | Splice Site Mutations |
| Alzheimer's | MAPT | Deregulated Alternative Splicing |
| disease/FTDP-17 | | |
| Taupathies | | |
| Spinal muscular atrophy | SMN2 | Deregulated Alternative Splicing |
| Dystrophic | COL7A1 | RNA Reframing |
| epidermolysis bullosa | | |
| Familial dysautonomia | IKBKAP | Splice Site Mutations |
| Cystic fibrosis | CFTR | Cryptic Splice Sites |
| Neurofibromatosis | NF1 | Regulatory Sequence Mutations |
| Alzheimer's | MAPT | Deregulated Alternative Splicing |
| disease/FTDP-17 | | |
| Taupathies | | |
| Cancer | Multiple | Deregulated Alternative Splicing |
| Spinal muscular atrophy | SMN2 | Deregulated Alternative Splicing |
| Cancer | CDKN1A | Detrimental Gene Expression |
| Cancer | MYC | Detrimental Gene Expression |
| Cancer | Multiple | Detrimental Gene Expression |
| Cancer | PHB | Detrimental Gene Expression |
| Duchenne muscular | DMD | RNA Reframing |
| dystrophy | | |
| Cystic Fibrosis | CFTR | Splice Site Mutations |
| Factor VII deficiency | F7 | Splice Site Mutations |
| Fanconi anemia | FANCC | Splice Site Mutations |
| Hemophilia A | F9 | Splice Site Mutations |
| Propionic acidemia | PCCA | Splice Site Mutations |
| Retinitis pigmentosa | RHO | Splice Site Mutations |
| Retinitis pigmentosa | RPGR | Splice Site Mutations |
| Spinal muscular atrophy | SMN2 | Deregulated Alternative Splicing |
| Bardet-Biedl syndrome | BBS1 | Splice Site Mutations |

| Disease | Human Target Gene | Therapeutic | Stage |
|---|---|---|---|
| Bardet-Biedl syndrome | BBS1 | U1/U6 snRNA* | Patient cells |
| Beta-thalassemia | HBB | PTM | Minigene |
| Cancer | BRCA1 | ASO | Minigene |
| Cancer | PTCH1 | ASO | Minigene |
| Cystic Fibrosis | CFTR | U1 snRNA* | Minigene |
| Duchenne muscular dystrophy | DMD | ASO | Canine model |
| Factor VII deficiency | F7 | U1 snRNA* | Minigene |
| Familial dysautonomia | IKBKAP | SM | Patients |
| Fanconi anemia | FANCC | U1 snRNA* | Patient cells |
| Hemophilia A | F9 | U1 snRNA* | Minigene |
| Propionic acidemia | PCCA | U1 snRNA* | Patient cells |
| Retinitis pigmentosa | RHO | U1 snRNA* | Minigenes |
| Retinitis pigmentosa | RPGR | U1 snRNA* | Patient cells |
| Ataxia telangiectasia | ATM | ASO | Patient cells |
| Beta-thalassemia | HBB | ASO | Mouse model |
| Cancer | BRCA2 | ASO | Minigene |
| CDG1A | PMM2 | ASO | Patient cells |
| Congenital adrenal insufficiency | CYP11A | ASO | Minigene |
| Cystic fibrosis | CFTR | ASO | Cell lines |
| Cystic fibrosis | CFTR | SM | Patient cells |
| Duchenne muscular dystrophy | DMD | ASO | Patient cells |
| Fukuyama congenital muscular | FKTN | ASO | Mouse model |
| dystrophy (FCMD) | | | |
| Growth hormone insensitivity | GHR | ASO | Minigene |
| HPABH4A | PTS | ASO | Patient cells |
| Hutchinson-Gilford progeria | LMNA | ASO | Mouse model |
| (HGPS) | | | |
| MLC1 | MLC1 | ASO | Minigene |
| Methylmalonic aciduria | MUT | ASO | Patient cells |
| Myopathy with lactic acidosis | ISCU | ASO | Patient cells |
| Myotonic dystrophy | CLC1 | ASO | Mouse model |
| Neurofibromatosis | NF1 | ASO | Patient cells |
| Niemann-Pick type C | NPC1 | ASO | Patient cells |
| Propionic acidemia | PCCB | ASO | Patient cells |
| Usher syndrome | USH1C | ASO | Mouse model |
| Afibrinogenemia | FGB | ASO | Minigene |
| Cancer | BRCA1 | ASO | In vitro |
| Propionic acidemia | PCCA | ASO | Patient cells |
| Neurofibromatosis | NF1 | SM | Patient cells |
| Ocular albinism type 1 | GRP143 | ASO | Patient cells |
| Alzheimer's disease/FTDP-17 | MAPT | ASO | Cell lines |
| Taupathies | | | |
| Alzheimer's disease/FTDP-17 | MAPT | PTM | Minigene |
| Taupathies | | | |
| Alzheimer's disease/FTDP-17 | MAPT | SM | Cell lines |
| Taupathies | | | |
| Cancer | BCL2L1 | ASO | Mouse model |
| Cancer | FGFR1 | ASO | Cell lines |
| Cancer | MCL1 | ASO | Cell lines |
| Cancer | MDM2 | ASO | Cell lines |
| Cancer | Multiple | SM | Cell lines |
| Cancer | PKM | ASO | Cell lines |
| Cancer | MST1R | ASO | Cell lines |
| Cancer | USP5 | ASO | Cell lines |
| Spinal muscular atrophy | SMN2 | ASO | Clinical |
| Spinal muscular atrophy | SMN2 | SM | Clincal trials |
| Spinal muscular atrophy | SMN2 | U1 snRNA* | Minigene |
| Spinal muscular atrophy | SMN2 | PTM | Mouse model |
| Alzheimer's disease | BACE1 | ASO | Cell lines |
| Cancer | CDKN1A | SM | Cell lines |
| Cancer | ERBB2 | ASO | Cell lines |
| Cancer | FLT1 | ASO | Mouse model |
| Cancer | HNRNPH1 | ASO | Patient cells |
| Cancer | KDR | ASO | Mouse model |
| Cancer | MYC | SM | Cell lines |
| Cancer | Multiple | SM | Clinical trials |
| | | | phase I, E7107 |
| Cancer | PHB | SM | Cell lines |
| Cancer | SRA1 | ASO | Cell lines |
| Cancer | STAT3 | ASO | Mouse model |
| Cancer | TERT | ASO | Cell lines |
| Cancer | WT1 | ASO | Cell lines |
| FHBL/atherosclerosis | APOB | ASO | Cell lines |
| Immune-response | CD40 | ASO | Cell lines |
| Inflammatory disease | TNFRSF1B | ASO | Mouse model |
| Inflammatory disease | IL5RA | ASO | Cell lines |
| Influenza virus | TMPRSS2 | ASO | Cell lines |
| Muscle wasting diseases | MSTN | ASO | Mouse model |
| Spinocerebellar ataxia type 1 | ATXN1 | ASO | Cell lines |
| Duchenne muscular dystrophy | DMD | ASO | Clinical |
| Duchenne muscular dystrophy | DMD | SM | Cell lines |
| Dystrophic epidermolysis | COL7A1 | ASO | Explants |
| bullosa | | | |
| Dystrophic epidermolysis | COL7A1 | PTM | Patient cells |
| bullosa | | | |
| Miyoshi myopathy | DYSF | ASO | Patient cells |

[1435] In some embodiments, a provided oligonucleotide composition is administered at a dose and/or frequency lower than that of an otherwise comparable reference oligonucleotide composition with comparable effect in altering the splicing of a target transcript. In some embodiments, a stereocontrolled oligonucleotide composition is administered at a dose and/or frequency lower than that of an otherwise comparable stereorandom reference oligonucleotide composition with comparable effect in altering the splicing of the target transcript. If desired, a provided composition can also be administered at higher dose/frequency due to its lower toxicities.

[1436] In some embodiments, the present disclosure recognizes that properties, e.g., activities, toxicities, etc. of oligonucleotides and compositions thereof can be optimized by chemical modifications and/or stereochemistry. In some embodiments, the present disclosure provides methods for optimizing oligonucleotide properties through chemical modifications and stereochemistry. In some embodiments, the present disclosure provides oligonucleotides and compositions and methods thereof with low toxicities. In some embodiments, the present disclosure provides oligonucleotides and compositions and methods thereof with low toxicities and enhanced activities (e.g., target-inhibition efficiency, specificity, cleavage rates, cleavage pattern, etc.). In some embodiments, the present disclosure provides oligonucleotides and compositions and methods thereof with improved protein binding profile. In some embodiments, the present disclosure provides oligonucleotides and compositions and methods thereof with improved protein binding profile and enhanced activities. In some embodiments, the present disclosure provides oligonucleotides and compositions and methods thereof with improved delivery and enhanced activities.

[1437] In some embodiments, provided oligonucleotides, compositions and methods have low toxicities, e.g., when compared to a reference composition. As widely known in the art, oligonucleotides can induce toxicities when administered to, e.g., cells, tissues, organism, etc. In some embodiments, oligonucleotides can induce undesired immune response. In some embodiments, oligonucleotide can induce complement activation. In some embodiments, oligonucleotides can induce activation of the alternative pathway of complement. In some embodiments, oligonucleotides can induce inflammation. Among other things, the complement system has strong cytolytic activity that can damages cells and should therefore be modulated to reduce potential injuries. In some embodiments, oligonucleotide-induced vascular injury is a recurrent challenge in the development of oligonucleotides for e.g., pharmaceutical use. In some embodiments, a primary source of inflammation when high doses of oligonucleotides are administered involves activation of the alternative complement cascade. In some embodiments, complement activation is a common challenge associated with phosphorothioate-containing oligonucleotides, and there is also a potential of some sequences of phosphorothioates to induce innate immune cell activation. In some embodiments, cytokine release is associated with administration of oligonucleotides. For example, in some embodiments, increases in interleukin-6 (IL-6) monocyte chemoattractant protein (MCP-1) and/or interleukin-12 (IL-12) is observed. See, e.g., Frazier, Antisense Oligonucleotide Therapies: The Promise and the Challenges from a Toxicologic Pathologist's Perspective. Toxicol Pathol., 43: 78-89, 2015; and Engelhardt, et al., Scientific and Regulatory Policy Committee Points-to-consider Paper: Drug-induced Vascular Injury Associated with Nonsmall Molecule Therapeutics in Preclinical Development: Part 2. Antisense Oligonucleotides. Toxicol Pathol. 43: 935-944, 2015.

[1438] By controlling of chemical modifications and/or stereochemistry, the present disclosure provides improved oligonucleotide compositions and methods. In some embodiments, provided oligonucleotides comprise chemical modifications. In some embodiments, provided oligonucleotides comprise base modifications, sugar modifications, internucleotidic linkage modifications, or any combinations thereof. In some embodiments, provided oligonucleotides comprise base modifications. In some embodiments, provided oligonucleotides comprise sugar modifications. In some embodiments, provided oligonucleotides comprises 2′-modifications on the sugar moieties. In some embodiments, the present disclosure demonstrates that 2′-modifications can lower toxicity. In some embodiments, provided oligonucleotides comprises one or more modified internucleotidic linkages and one or more natural phosphate linkages. In some embodiments, the present disclosure demonstrates that incorporation of one or more natural phosphate linkages into oligonucleotides comprising one or more modified internucleotidic linkages can lower toxicity. A natural phosphate linkage can be incorporated into various locations of an oligonucleotide. In some embodiments, a natural phosphate linkage is incorporated into a wing region, or a region close to the 5′- or the 3′-end. In some embodiments, a natural phosphate linkage is incorporated into the middle of an oligonucleotide. In some embodiments, a natural phosphate linkage is incorporated into a core region. In some embodiments, the present disclosure demonstrates that stereochemistry, either alone or in combination with chemical modifications, can modulate toxicity. In some embodiments, the present disclosure demonstrates that stereochemistry, either alone or in combination with chemical modifications, can modulate immune response. In some embodiments, the present disclosure demonstrates that stereochemistry, either alone or in combination with chemical modifications, can modulate complement activation. It is surprisingly found that a chirally controlled oligonucleotide composition of an individual stereoisomer can have dramatically different toxicity profile, e.g., complement activation, compared to the corresponding stereorandom composition, and/or a chirally controlled oligonucleotide composition of another individual stereoisomer. In some embodiments, the present disclosure demonstrates that stereochemistry, either alone or in combination with chemical modifications, can modulate complement activation via the alternative pathway. Example chemical modifications, stereochemistry and patterns thereof are extensively described in this disclosure, and they can be used in combinations. Example compositions and methods of are also extensively described in this disclosure. A person having ordinary skill in the art understands that methods and compositions described herein can be used to either increase or decrease immune responses, including complement activation, relative to a reference composition.

[1439] Delivery of oligonucleotides to target locations can benefit conjugation with lipids. In some embodiments, the present disclosure provides a method comprising administering a provided composition, which composition displays improved delivery as compared with a reference composition which does not comprise the lipids in the provided composition.

[1440] In some embodiments, provided oligonucleotides, compositions and methods provide improved cytoplasmatic delivery. In some embodiments, improved delivery is to a population of cells. In some embodiments, improved delivery is to a tissue. In some embodiments, improved delivery is to an organ. In some embodiments, improved delivery is to an organism. In some embodiments, improved delivery is to muscle.

[1441] In some embodiments, a reference oligonucleotide composition of a provided oligonucleotide composition is a comparable composition absence of the lipids in the provided composition. In some embodiments, a reference oligonucleotide composition is a stereorandom oligonucleotide composition. In some embodiments, a reference oligonucleotide composition is a stereorandom composition of oligonucleotides of which all internucleotidic linkages are phosphorothioate. In some embodiments, a reference oligonucleotide composition is a DNA oligonucleotide composition with all phosphate linkages. In some embodiments, a reference composition is a composition of oligonucleotides having the same base sequence and the same chemical modifications. In some embodiments, a reference composition is a composition of oligonucleotides having the same base sequence and the same pattern of chemical modifications. In some embodiments, a reference composition is a chirally un-controlled (or stereorandom) composition of oligonucleotides having the same base sequence and chemical modifications. In some embodiments, a reference composition is a composition of oligonucleotides having the same base sequence but different chemical modifications. In some embodiments, a reference composition is a composition of oligonucleotides having the same base sequence, base modifications, internucleotidic linkage modifications but different sugar modifications. In some embodiments, a reference composition has fewer 2′-modified sugar modifications. In some embodiments, a reference composition is a composition of oligonucleotides having the same base sequence, base modifications, sugar modifications but different internucleotidic linkage modifications. In some embodiments, a reference composition has more internucleotidic linkage modifications. In some embodiments, a reference composition has fewer natural phosphate linkages. In some embodiments, a reference composition comprising oligonucleotides having no natural phosphate linkages. In some embodiments, a reference composition is a composition comprising a reference plurality of oligonucleotides wherein individual oligonucleotides within the reference plurality differ from one another in stereochemical structure. In some embodiments, a reference composition is a composition comprising a reference plurality of oligonucleotides, wherein at least some oligonucleotides within the reference plurality have a structure different from a structure represented by a plurality of oligonucleotides of a composition compared to the reference composition. In some embodiments, a reference composition is a composition comprising a reference plurality of oligonucleotides wherein at least some oligonucleotides within the reference plurality do not comprise a wing region and a core region. In some embodiments, a reference oligonucleotide composition comprises a reference plurality of oligonucleotides having the same common nucleotide sequence but lacking at least one of the one or more modified sugar moieties in oligonucleotides of the oligonucleotide composition compared to the reference composition. In some embodiments, a reference oligonucleotide composition comprises a reference plurality of oligonucleotides having the same common nucleotide sequence but have no modified sugar moieties. In some embodiments, a reference oligonucleotide composition comprises a reference plurality of oligonucleotides having the same common nucleotide sequence but do not comprise natural phosphate linkages. In some embodiments, a reference composition is a chirally controlled oligonucleotide composition of oligonucleotides having the same chemical modification patterns. In some embodiments, a reference composition is a chirally controlled oligonucleotide composition of another stereoisomer.

[1442] In some embodiments, provided oligonucleotides comprise one or more structural elements (e.g., modifications, stereochemistry, patterns, etc.) that oligonucleotides of the reference plurality do not all have. Such structural elements can be any one described in this disclosure.

[1443] In some embodiments, oligonucleotides of a provided composition comprise more phosphorothioate linkages than oligonucleotides of the reference composition. In some embodiments, oligonucleotides of a provided composition comprise more phosphorothioate linkages than oligonucleotides of the reference composition at the 5′-end region. In some embodiments, oligonucleotides of a provided composition comprise more phosphorothioate linkages than oligonucleotides of the reference composition at the 3′-end region. In some embodiments, oligonucleotides of a provided composition comprise more phosphorothioate linkages in a wing region than the corresponding region of oligonucleotides of the reference composition. In some embodiments, oligonucleotides of a provided composition comprise more phosphorothioate linkages in each wing region than the corresponding regions in oligonucleotides of the reference composition. In some embodiments, oligonucleotides of a provided composition comprise more Sp chiral internucleotidic linkages than oligonucleotides of the reference composition. In some embodiments, oligonucleotides of a provided composition comprise more Sp phosphorothioate linkages than oligonucleotides of the reference composition. In some embodiments, oligonucleotides of a provided composition comprise more Sp phosphorothioate linkages than oligonucleotides of the reference composition at the 5′-end region. In some embodiments, oligonucleotides of a provided composition comprise more Sp phosphorothioate linkages than oligonucleotides of the reference composition at the 3′-end region. In some embodiments, oligonucleotides of a provided composition comprise more Sp phosphorothioate linkages in a wing region than oligonucleotides of the reference composition. In some embodiments, oligonucleotides of a provided composition comprise more Sp phosphorothioate linkages in each wing region than oligonucleotides of the reference composition. In some embodiments, oligonucleotides of a provided composition comprise more modified bases than oligonucleotides of the reference composition. In some embodiments, oligonucleotides of a provided composition comprise more methylated bases than oligonucleotides of the reference composition. In some embodiments, oligonucleotides of a provided composition comprise more methylated bases than oligonucleotides of the reference composition at the 5′-end region. In some embodiments, oligonucleotides of a provided composition comprise more methylated bases than oligonucleotides of the reference composition at the 3′-end region. In some embodiments, oligonucleotides of a provided composition comprise more methylated bases than in a wing region than oligonucleotides of the reference composition. In some embodiments, oligonucleotides of a provided composition comprise more methylated bases than in each wing region than oligonucleotides of the reference composition.

[1444] In some embodiments, oligonucleotides of a provided composition comprise fewer 2′-MOE modifications than oligonucleotides of the reference composition. In some embodiments, oligonucleotides of a provided composition comprise fewer 2′-MOE modifications than oligonucleotides of the reference composition. In some embodiments, oligonucleotides of a provided composition comprise fewer 2′-MOE modifications than oligonucleotides of the reference composition at the 5′-end region. In some embodiments, oligonucleotides of a provided composition comprise fewer 2′-MOE modifications than oligonucleotides of the reference composition at the 3′-end. In some embodiments, oligonucleotides of a provided composition comprise fewer 2′-MOE modifications than in a wing region than oligonucleotides of the reference composition. In some embodiments, oligonucleotides of a provided composition comprise fewer 2′-MOE modifications than in each wing region than oligonucleotides of the reference composition. In some embodiments, individual oligonucleotides within the reference plurality differ from one another in stereochemical structure. In some embodiments, at least some oligonucleotides within the reference plurality have a structure different from a structure represented by the plurality of oligonucleotides of the composition. In some embodiments, at least some oligonucleotides within the reference plurality do not comprise a wing region and a core region. In some embodiments, the reference composition is a substantially racemic preparation of oligonucleotides that share the base sequence. In some embodiments, the reference composition is a chirally controlled oligonucleotide composition of another oligonucleotide type. In some embodiments, oligonucleotides of the reference composition comprise more phosphorothioate linkages. In some embodiments, oligonucleotides of the reference composition comprise only phosphorothioate linkages. In some embodiments, oligonucleotides of the reference composition comprise fewer modified sugar moieties. In some embodiments, oligonucleotides of the reference composition comprise fewer modified sugar moieties, wherein the modification is 2′-OR¹. In some embodiments, oligonucleotides of the reference composition comprise more modified sugar moieties. In some embodiments, oligonucleotides of the reference composition comprise more modified sugar moieties, the modification is 2′-OR¹. In some embodiments, oligonucleotides of the reference composition comprise fewer phosphorothioate linkages. In some embodiments, oligonucleotides of the reference composition have a wing, and comprise fewer phosphorothioate linkages at the wing. In some embodiments, oligonucleotides of the reference composition comprise fewer Sp phosphorothioate linkages. In some embodiments, oligonucleotides of the reference composition have a wing, and comprise fewer Sp phosphorothioate linkages at the wing. In some embodiments, oligonucleotides of the reference composition comprise more Rp phosphorothioate linkages. In some embodiments, oligonucleotides of the reference composition have a wing, and comprise more Rp phosphorothioate linkages at the wing. In some embodiments, oligonucleotides of the reference composition comprise fewer methylated bases. In some embodiments, oligonucleotides of the reference composition comprise more 2′-MOE modifications. In some embodiments, oligonucleotides of the reference composition comprise fewer natural phosphate linkages. In some embodiments, oligonucleotides of the reference composition comprise fewer natural phosphate linkages at the 5′- and/or 3′-end. In some embodiments, oligonucleotides of the reference composition comprise fewer natural phosphate linkages in a region corresponding to a wing of oligonucleotides of the first plurality. In some embodiments, oligonucleotides of a provided composition comprise natural phosphate linkages in a wing, and oligonucleotides of the reference composition comprise fewer natural phosphate linkages at the corresponding wing region. In some embodiments, oligonucleotides of a provided composition comprises natural phosphate linkages in a wing, and oligonucleotides of the reference composition comprises modified internucleotidic linkages at one or more such natural phosphate linkage locations in a wing. In some embodiments, oligonucleotides of a provided composition comprise natural phosphate linkages in a wing, and oligonucleotides of the reference composition comprises phosphorothioate linkages at one or more such natural phosphate linkage locations in a wing. In some embodiments, oligonucleotides of the reference composition comprise no natural phosphate linkages. In some embodiments, oligonucleotides of the reference composition comprise no wing-core-wing structure. In some embodiments, oligonucleotides of a provided composition comprise a 5′-end wing region comprising a natural phosphate linkage between the two nucleosides at its 3′-end, and oligonucleotides of a reference plurality do not have a natural phosphate linkage at the same position. In some embodiments, oligonucleotides of a provided composition comprise a 3′-end wing region comprising a natural phosphate linkage between the two nucleosides at its 5′-end, and oligonucleotides of a reference plurality do not have a natural phosphate linkage at the same position.

[1445] In some embodiments, oligonucleotides of a provided composition contain more 2′-F modifications than oligonucleotides of a reference composition. In some embodiments, oligonucleotides of a provided composition contain more 2′-F modifications in a wing region. In some embodiments, oligonucleotides of a provided composition contain more 2′-F modifications in each wing region.

[1446] In some embodiments, provided chirally controlled oligonucleotide compositions comprises oligonucleotides of one oligonucleotide type. In some embodiments, provided chirally controlled oligonucleotide compositions comprises oligonucleotides of only one oligonucleotide type. In some embodiments, provided chirally controlled oligonucleotide compositions has oligonucleotides of only one oligonucleotide type. In some embodiments, provided chirally controlled oligonucleotide compositions comprises oligonucleotides of two or more oligonucleotide types. In some embodiments, using such compositions, provided methods can target more than one target. In some embodiments, a chirally controlled oligonucleotide composition comprising two or more oligonucleotide types targets two or more targets. In some embodiments, a chirally controlled oligonucleotide composition comprising two or more oligonucleotide types targets two or more mismatches. In some embodiments, a single oligonucleotide type targets two or more targets, e.g., mutations. In some embodiments, a target region of oligonucleotides of one oligonucleotide type comprises two or more “target sites” such as two mutations or SNPs.

[1447] In some embodiments, oligonucleotides in a provided chirally controlled oligonucleotide composition optionally comprise modified bases or sugars. In some embodiments, a provided chirally controlled oligonucleotide composition does not have any modified bases or sugars. In some embodiments, a provided chirally controlled oligonucleotide composition does not have any modified bases. In some embodiments, oligonucleotides in a provided chirally controlled oligonucleotide composition comprise modified bases and sugars. In some embodiments, oligonucleotides in a provided chirally controlled oligonucleotide composition comprise a modified base. In some embodiments, oligonucleotides in a provided chirally controlled oligonucleotide composition comprise a modified sugar. Modified bases and sugars for oligonucleotides are widely known in the art, including but not limited in those described in the present disclosure. In some embodiments, a modified base is 5-mC. In some embodiments, a modified sugar is a 2′-modified sugar. Suitable 2′-modification of oligonucleotide sugars are widely known by a person having ordinary skill in the art. In some embodiments, 2′-modifications include but are not limited to 2′-OR¹, wherein R¹ is not hydrogen. In some embodiments, a 2′-modification is 2′-OR, wherein R¹ is optionally substituted C₁₋₆ aliphatic. In some embodiments, a 2′-modification is 2′-MOE. In some embodiments, a modification is 2′-halogen. In some embodiments, a modification is 2′-F. In some embodiments, modified bases or sugars may further enhance activity, stability and/or selectivity of a chirally controlled oligonucleotide composition, whose common pattern of backbone chiral centers provides unexpected activity, stability and/or selectivity.

[1448] In some embodiments, a provided chirally controlled oligonucleotide composition does not have any modified sugars. In some embodiments, a provided chirally controlled oligonucleotide composition does not have any 2′-modified sugars. In some embodiments, the present disclosure surprising found that by using chirally controlled oligonucleotide compositions, modified sugars are not needed for stability, activity, and/or control of cleavage patterns. Furthermore, in some embodiments, the present disclosure surprisingly found that chirally controlled oligonucleotide compositions of oligonucleotides without modified sugars deliver better properties in terms of stability, activity, turn-over and/or control of cleavage patterns. For example, in some embodiments, it is surprising found that chirally controlled oligonucleotide compositions of oligonucleotides having no modified sugars dissociates much faster from cleavage products and provide significantly increased turn-over than compositions of oligonucleotides with modified sugars.

[1449] As discussed in detail herein, the present disclosure provides, among other things, a chirally controlled oligonucleotide composition, meaning that the composition contains a plurality of oligonucleotides of at least one type. Each oligonucleotide molecule of a particular “type” is comprised of preselected (e.g., predetermined) structural elements with respect to: (1) base sequence; (2) pattern of backbone linkages; (3) pattern of backbone chiral centers; and (4) pattern of backbone P-modification moieties. In some embodiments, provided oligonucleotide compositions contain oligonucleotides that are prepared in a single synthesis process. In some embodiments, provided compositions contain oligonucleotides having more than one chiral configuration within a single oligonucleotide molecule (e.g., where different residues along the oligonucleotide have different stereochemistry); in some such embodiments, such oligonucleotides may be obtained in a single synthesis process, without the need for secondary conjugation steps to generate individual oligonucleotide molecules with more than one chiral configuration.

[1450] Oligonucleotide compositions as provided herein can be used as agents for modulating a number of cellular processes and machineries, including but not limited to, transcription, translation, immune responses, epigenetics, etc. In addition, oligonucleotide compositions as provided herein can be used as reagents for research and/or diagnostic purposes. One of ordinary skill in the art will readily recognize that the present disclosure disclosure herein is not limited to particular use but is applicable to any situations where the use of synthetic oligonucleotides is desirable. Among other things, provided compositions are useful in a variety of therapeutic, diagnostic, agricultural, and/or research applications.

[1451] In some embodiments, provided oligonucleotide compositions comprise oligonucleotides and/or residues thereof that include one or more structural modifications as described in detail herein. In some embodiments, provided oligonucleotide compositions comprise oligonucleoties that contain one or more nucleic acid analogs. In some embodiments, provided oligonucleotide compositions comprise oligonucleotides that contain one or more artificial nucleic acids or residues, including but not limited to: peptide nucleic acids (PNA), Morpholino and locked nucleic acids (LNA), glycon nucleic acids (GNA), threose nucleic acids (TNA), Xeno nucleic acids (ZNA), and any combination thereof.

[1452] In any of the embodiments, the disclosure is useful for oligonucleotide-based modulation of gene expression, immune response, etc. Accordingly, stereo-defined, oligonucleotide compositions of the disclosure, which contain oligonucleotides of predetermined type (i.e., which are chirally controlled, and optionally chirally pure), can be used in lieu of conventional stereo-random or chirally impure counterparts. In some embodiments, provided compositions show enhanced intended effects and/or reduced unwanted side effects. Certain embodiments of biological and clinical/therapeutic applications of the disclosure are discussed explicitly below.

[1453] Various dosing regimens can be utilized to administer provided chirally controlled oligonucleotide compositions. In some embodiments, multiple unit doses are administered, separated by periods of time. In some embodiments, a given composition has a recommended dosing regimen, which may involve one or more doses. In some embodiments, a dosing regimen comprises a plurality of doses each of which are separated from one another by a time period of the same length; in some embodiments, a dosing regimen comprises a plurality of doses and at least two different time periods separating individual doses. In some embodiments, all doses within a dosing regimen are of the same unit dose amount. In some embodiments, different doses within a dosing regimen are of different amounts. In some embodiments, a dosing regimen comprises a first dose in a first dose amount, followed by one or more additional doses in a second dose amount different from the first dose amount. In some embodiments, a dosing regimen comprises a first dose in a first dose amount, followed by one or more additional doses in a second (or subsequent) dose amount that is same as or different from the first dose (or another prior dose) amount. In some embodiments, a dosing regimen comprises administering at least one unit dose for at least one day. In some embodiments, a dosing regimen comprises administering more than one dose over a time period of at least one day, and sometimes more than one day. In some embodiments, a dosing regimen comprises administering multiple doses over a time period of at least week. In some embodiments, the time period is at least 2, 3, 4, 5, 6, 7, 8, 9, 10, 11, 12, 13, 14, 15, 16, 17, 18, 19, 20, 21, 22, 23 24, 25, 26, 27, 28, 29, 30, 31, 32, 33, 34, 35, 36, 37, 38, 39, 40 or more (e.g., about 45, 50, 55, 60, 65, 70, 75, 80, 85, 90, 95, 100 or more) weeks. In some embodiments, a dosing regimen comprises administering one dose per week for more than one week. In some embodiments, a dosing regimen comprises administering one dose per week for 2, 3, 4, 5, 6, 7, 8, 9, 10, 11, 12, 13, 14, 15, 16, 17, 18, 19, 20, 21, 22, 23 24, 25, 26, 27, 28, 29, 30, 31, 32, 33, 34, 35, 36, 37, 38, 39, 40 or more (e.g., about 45, 50, 55, 60, 65, 70, 75, 80, 85, 90, 95, 100 or more) weeks. In some embodiments, a dosing regimen comprises administering one dose every two weeks for more than two week period. In some embodiments, a dosing regimen comprises administering one dose every two weeks over a time period of 2, 3, 4, 5, 6, 7, 8, 9, 10, 11, 12, 13, 14, 15, 16, 17, 18, 19, 20, 21, 22, 23 24, 25, 26, 27, 28, 29, 30, 31, 32, 33, 34, 35, 36, 37, 38, 39, 40 or more (e.g., about 45, 50, 55, 60, 65, 70, 75, 80, 85, 90, 95, 100 or more) weeks. In some embodiments, a dosing regimen comprises administering one dose per month for one month. In some embodiments, a dosing regimen comprises administering one dose per month for more than one month. In some embodiments, a dosing regimen comprises administering one dose per month for 2, 3, 4, 5, 6, 7, 8, 9, 10, 11, 12, or more months. In some embodiments, a dosing regimen comprises administering one dose per week for about 10 weeks. In some embodiments, a dosing regimen comprises administering one dose per week for about 20 weeks. In some embodiments, a dosing regimen comprises administering one dose per week for about 30 weeks. In some embodiments, a dosing regimen comprises administering one dose per week for 26 weeks. In some embodiments, a chirally controlled oligonucleotide composition is administered according to a dosing regimen that differs from that utilized for a chirally uncontrolled (e.g., stereorandom) oligonucleotide composition of the same sequence, and/or of a different chirally controlled oligonucleotide composition of the same sequence. In some embodiments, a chirally controlled oligonucleotide composition is administered according to a dosing regimen that is reduced as compared with that of a chirally uncontrolled (e.g., sterorandom) oligonucleotide composition of the same sequence in that it achieves a lower level of total exposure over a given unit of time, involves one or more lower unit doses, and/or includes a smaller number of doses over a given unit of time. In some embodiments, a chirally controlled oligonucleotide composition is administered according to a dosing regimen that extends for a longer period of time than does that of a chirally uncontrolled (e.g., stereorandom) oligonucleotide composition of the same sequence Without wishing to be limited by theory, Applicant notes that in some embodiments, the shorter dosing regimen, and/or longer time periods between doses, may be due to the improved stability, bioavailability, and/or efficacy of a chirally controlled oligonucleotide composition. In some embodiments, a chirally controlled oligonucleotide composition has a longer dosing regimen compared to the corresponding chirally uncontrolled oligonucleotide composition. In some embodiments, a chirally controlled oligonucleotide composition has a shorter time period between at least two doses compared to the corresponding chirally uncontrolled oligonucleotide composition. Without wishing to be limited by theory, Applicant notes that in some embodiments longer dosing regimen, and/or shorter time periods between doses, may be due to the improved safety of a chirally controlled oligonucleotide composition.

[1454] In some embodiments, with their low toxicity, provided oligonucleotides and compositions can be administered in higher dosage and/or with higher frequency. In some embodiments, with their improved delivery (and other properties), provided compositions can be administered in lower dosages and/or with lower frequency to achieve biological effects, for example, clinical efficacy.

[1455] A single dose can contain various amounts of oligonucleotides. In some embodiments, a single dose can contain various amounts of a type of chirally controlled oligonucleotide, as desired suitable by the application. In some embodiments, a single dose contains about 1, 5, 10, 20, 30, 40, 50, 60, 70, 80, 90, 100, 110, 120, 130, 140, 150, 160, 170, 180, 190, 200, 210, 220, 230, 240, 250, 260, 270, 280, 290, 300 or more (e.g., about 350, 400, 450, 500, 550, 600, 650, 700, 750, 800, 850, 900, 950, 1000 or more) mg of a type of chirally controlled oligonucleotide. In some embodiments, a single dose contains about 1 mg of a type of chirally controlled oligonucleotide. In some embodiments, a single dose contains about 5 mg of a type of chirally controlled oligonucleotide. In some embodiments, a single dose contains about 10 mg of a type of chirally controlled oligonucleotide. In some embodiments, a single dose contains about 15 mg of a type of chirally controlled oligonucleotide. In some embodiments, a single dose contains about 20 mg of a type of chirally controlled oligonucleotide. In some embodiments, a single dose contains about 50 mg of a type of chirally controlled oligonucleotide. In some embodiments, a single dose contains about 100 mg of a type of chirally controlled oligonucleotide. In some embodiments, a single dose contains about 150 mg of a type of chirally controlled oligonucleotide. In some embodiments, a single dose contains about 200 mg of a type of chirally controlled oligonucleotide. In some embodiments, a single dose contains about 250 mg of a type of chirally controlled oligonucleotide. In some embodiments, a single dose contains about 300 mg of a type of chirally controlled oligonucleotide. In some embodiments, a chirally controlled oligonucleotide is administered at a lower amount in a single dose, and/or in total dose, than a chirally uncontrolled oligonucleotide. In some embodiments, a chirally controlled oligonucleotide is administered at a lower amount in a single dose, and/or in total dose, than a chirally uncontrolled oligonucleotide due to improved efficacy. In some embodiments, a chirally controlled oligonucleotide is administered at a higher amount in a single dose, and/or in total dose, than a chirally uncontrolled oligonucleotide. In some embodiments, a chirally controlled oligonucleotide is administered at a higher amount in a single dose, and/or in total dose, than a chirally uncontrolled oligonucleotide due to improved safety.

[1456] A provided oligonucleotide composition as used herein may comprise single stranded and/or multiply stranded oligonucleotides. In some embodiments, single-stranded oligonucleotides contain self-complementary portions that may hybridize under relevant conditions so that, as used, even single-stranded oligonucleotides may have at least partially double-stranded character. In some embodiments, an oligonucleotide included in a provided composition is single-stranded, double-stranded, or triple-stranded. In some embodiments, an oligonucleotide included in a provided composition comprises a single-stranded portion and a multiple-stranded portion within the oligonucleotide. In some embodiments, as noted above, individual single-stranded oligonucleotides can have double-stranded regions and single-stranded regions.

[1457] In some embodiments, provided compositions include one or more oligonucleotides fully or partially complementary to strand of: structural genes, genes control and/or termination regions, and/or self-replicating systems such as viral or plasmid DNA. In some embodiments, provided compositions include one or more oligonucleotides that are or act as siRNAs or other RNA interference reagents (RNAi agents or iRNA agents), shRNA, antisense oligonucleotides, self-cleaving RNAs, ribozymes, fragment thereof and/or variants thereof (such as Peptidyl transferase 23S rRNA, RNase P, Group I and Group II introns, GIR1 branching ribozymes, Leadzyme, Hairpin ribozymes, Hammerhead ribozymes, HDV ribozymes, Mammalian CPEB3 ribozyme, VS ribozymes, glmS ribozymes, CoTC ribozyme, etc.), microRNAs, microRNA mimics, supermirs, aptamers, antimirs, antagomirs, Ul adaptors, triplex-forming oligonucleotides, RNA activators, long non-coding RNAs, short non-coding RNAs (e.g., piRNAs), immunomodulatory oligonucleotides (such as immunostimulatory oligonucleotides, immunoinhibitory oligonucleotides), GNA, LNA, ENA, PNA, TNA, morpholinos, G-quadruplex (RNA and DNA), antiviral oligonucleotides, and decoy oligonucleotides.

[1458] In some embodiments, provided compositions include one or more hybrid (e.g., chimeric) oligonucleotides. In the context of the present disclosure, the term “hybrid” broadly refers to mixed structural components of oligonucloetides. Hybrid oliogonucleotides may refer to, for example, (1) an oligonucleotide molecule having mixed classes of nucleotides, e.g., part DNA and part RNA within the single molecule (e.g., DNA-RNA); (2) complementary pairs of nucleic acids of different classes, such that DNA:RNA base pairing occurs either intramolecularly or intermolecularly; or both; (3) an oligonucleotide with two or more kinds of the backbone or internucleotide linkages.

[1459] In some embodiments, provided compositions include one or more oligonucleotide that comprises more than one classes of nucleic acid residues within a single molecule. For example, in any of the embodiments described herein, an oligonucleotide may comprise a DNA portion and an RNA portion. In some embodiments, an oligonucleotide may comprise a unmodified portion and modified portion.

[1460] Provided oligonucleotide compositions can include oligonucleotides containing any of a variety of modifications, for example as described herein. In some embodiments, particular modifications are selected, for example, in light of intended use. In some embodiments, it is desirable to modify one or both strands of a double-stranded oligonucleotide (or a double-stranded portion of a single-stranded oligonucleotide). In some embodiments, the two strands (or portions) include different modifications. In some embodiments, the two strands include the same modifications. One of skill in the art will appreciate that the degree and type of modifications enabled by methods of the present disclosure allow for numerous permutations of modifications to be made. Example such modifications are described herein and are not meant to be limiting.

[1461] The phrase “antisense strand” as used herein, refers to an oligonucleotide that is substantially or 100% complementary to a target sequence of interest. The phrase “antisense strand” includes the antisense region of both oligonucleotides that are formed from two separate strands, as well as unimolecular oligonucleotides that are capable of forming hairpin or dumbbell type structures. The terms “antisense strand” and “guide strand” are used interchangeably herein.

[1462] The phrase “sense strand” refers to an oligonucleotide that has the same nucleoside sequence, in whole or in part, as a target sequence such as a messenger RNA or a sequence of DNA. The terms “sense strand” and “passenger strand” are used interchangeably herein.

[1463] By “target sequence” is meant any nucleic acid sequence whose expression or activity is to be modulated. The target nucleic acid can be DNA or RNA, such as endogenous DNA or RNA, viral DNA or viral RNA, or other RNA encoded by a gene, virus, bacteria, fungus, mammal, or plant. In some embodiments, a target sequence is associated with a disease or disorder.

[1464] By “specifically hybridizable” and “complementary” is meant that a nucleic acid can form hydrogen bond(s) with another nucleic acid sequence by either traditional Watson-Crick or other non-traditional types. In reference to the nucleic molecules of the present disclosure, the binding free energy for a nucleic acid molecule with its complementary sequence is sufficient to allow the relevant function of the nucleic acid to proceed, e.g., RNAi activity. Determination of binding free energies for nucleic acid molecules is well known in the art (see, e.g., Turner et al, 1987, CSH Symp. Quant. Biol. LIT pp. 123-133; Freier et al., 1986, Proc. Nat. Acad. Sci. USA 83:9373-9377; Turner et al., 1987, J. Am. Chem. Soc. 109:3783-3785)

[1465] A percent complementarity indicates the percentage of contiguous residues in a nucleic acid molecule that can form hydrogen bonds (e.g., Watson-Crick base pairing) with a second nucleic acid sequence (e.g., 5, 6, 7, 8, 9, 10 out of 10 being 50%, 60%, 70%, 80%, 90%, and 100% complementary). “Perfectly complementary” or 100% complementarity means that all the contiguous residues of a nucleic acid sequence will hydrogen bond with the same number of contiguous residues in a second nucleic acid sequence. Less than perfect complementarity refers to the situation in which some, but not all, nucleoside units of two strands can hydrogen bond with each other. “Substantial complementarity” refers to polynucleotide strands exhibiting 90% or greater complementarity, excluding regions of the polynucleotide strands, such as overhangs, that are selected so as to be noncomplementary. Specific binding requires a sufficient degree of complementarity to avoid non-specific binding of the oligomeric compound to non-target sequences under conditions in which specific binding is desired, e.g., under physiological conditions in the case of in vivo assays or therapeutic treatment, or in the case of in vitro assays, under conditions in which the assays are performed. In some embodiments, non-target sequences differ from corresponding target sequences by at least 5 nucleotides.

[1466] When used as therapeutics, a provided oligonucleotide is administered as a pharmaceutical composition. In some embodiments, the pharmaceutical composition comprises a therapeutically effective amount of a provided oligonucleotide comprising, or a pharmaceutically acceptable salt thereof, and at least one pharmaceutically acceptable inactive ingredient selected from pharmaceutically acceptable diluents, pharmaceutically acceptable excipients, and pharmaceutically acceptable carriers. In some embodiments, in provided compositions provided oligonucleotides may exist as salts, preferably pharmaceutically acceptable salts, e.g., sodium salts, ammonium salts, etc. In some embodiments, a salt of a provided oligonucleotide comprises two or more cations, for example, in some embodiments, up to the number of negatively charged acidic groups (e.g., phosphate, phosphorothioate, etc.) in an oligonucleotide. In another embodiment, the pharmaceutical composition is formulated for intravenous injection, oral administration, buccal administration, inhalation, nasal administration, topical administration, ophthalmic administration or otic administration. In further embodiments, the pharmaceutical composition is a tablet, a pill, a capsule, a liquid, an inhalant, a nasal spray solution, a suppository, a suspension, a gel, a colloid, a dispersion, a suspension, a solution, an emulsion, an ointment, a lotion, an eye drop or an ear drop.

### Pharmaceutical Compositions

[1467] When used as therapeutics, a provided oligonucleotide or oligonucleotide composition described herein is administered as a pharmaceutical composition. In some embodiments, the pharmaceutical composition comprises a therapeutically effective amount of a provided oligonucleotides, or a pharmaceutically acceptable salt thereof, and at least one pharmaceutically acceptable inactive ingredient selected from pharmaceutically acceptable diluents, pharmaceutically acceptable excipients, and pharmaceutically acceptable carriers. In some embodiments, the pharmaceutical composition is formulated for intravenous injection, oral administration, buccal administration, inhalation, nasal administration, topical administration, ophthalmic administration or otic administration. In some embodiments, the pharmaceutical composition is a tablet, a pill, a capsule, a liquid, an inhalant, a nasal spray solution, a suppository, a suspension, a gel, a colloid, a dispersion, a suspension, a solution, an emulsion, an ointment, a lotion, an eye drop or an ear drop.

[1468] In some embodiments, the present disclosure provides a pharmaceutical composition comprising chirally controlled oligonucleotide, or composition thereof, in admixture with a pharmaceutically acceptable excipient. One of skill in the art will recognize that the pharmaceutical compositions include the pharmaceutically acceptable salts of the chirally controlled oligonucleotide, or composition thereof, described above.

[1469] A variety of supramolecular nanocarriers can be used to deliver nucleic acids. Example nanocarriers include, but are not limited to liposomes, cationic polymer complexes and various polymeric. Complexation of nucleic acids with various polycations is another approach for intracellular delivery; this includes use of PEGlyated polycations, polyethyleneamine (PEI) complexes, cationic block co-polymers, and dendrimers. Several cationic nanocarriers, including PEI and polyamidoamine dendrimers help to release contents from endosomes. Other approaches include use of polymeric nanoparticles, polymer micelles, quantum dots and lipoplexes. In some embodiments, an oligonucleotide is conjugated to another molecular.

[1470] Additional nucleic acid delivery strategies are known in addition to the example delivery strategies described herein.

[1471] In therapeutic and/or diagnostic applications, the compounds of the disclosure can be formulated for a variety of modes of administration, including systemic and topical or localized administration. Techniques and formulations generally may be found in Remington, The Science and Practice of Pharmacy, (20th ed. 2000).

[1472] Provided oligonucleotides, and compositions thereof, are effective over a wide dosage range. For example, in the treatment of adult humans, dosages from about 0.01 to about 1000 mg, from about 0.5 to about 100 mg, from about 1 to about 50 mg per day, and from about 5 to about 100 mg per day are examples of dosages that may be used. The exact dosage will depend upon the route of administration, the form in which the compound is administered, the subject to be treated, the body weight of the subject to be treated, and the preference and experience of the attending physician.

[1473] Pharmaceutically acceptable salts are generally well known to those of ordinary skill in the art, and may include, by way of example but not limitation, acetate, benzenesulfonate, besylate, benzoate, bicarbonate, bitartrate, bromide, calcium edetate, carnsylate, carbonate, citrate, edetate, edisylate, estolate, esylate, fumarate, gluceptate, gluconate, glutamate, glycollylarsanilate, hexylresorcinate, hydrabamine, hydrobromide, hydrochloride, hydroxynaphthoate, iodide, isethionate, lactate, lactobionate, malate, maleate, mandelate, mesylate, mucate, napsylate, nitrate, pamoate (embonate), pantothenate, phosphate/diphosphate, polygalacturonate, salicylate, stearate, subacetate, succinate, sulfate, tannate, tartrate, or teoclate. Other pharmaceutically acceptable salts may be found in, for example, Remington, The Science and Practice of Pharmacy (20th ed. 2000). Preferred pharmaceutically acceptable salts include, for example, acetate, benzoate, bromide, carbonate, citrate, gluconate, hydrobromide, hydrochloride, maleate, mesylate, napsylate, pamoate (embonate), phosphate, salicylate, succinate, sulfate, or tartrate.

[1474] Depending on the specific conditions being treated, such agents may be formulated into liquid or solid dosage forms and administered systemically or locally. The agents may be delivered, for example, in a timed- or sustained-low release form as is known to those skilled in the art. Techniques for formulation and administration may be found in Remington, The Science and Practice of Pharmacy (20th ed. 2000). Suitable routes may include oral, buccal, by inhalation spray, sublingual, rectal, transdermal, vaginal, transmucosal, nasal or intestinal administration; parenteral delivery, including intramuscular, subcutaneous, intramedullary injections, as well as intrathecal, direct intraventricular, intravenous, intra-articullar, intra-sternal, intra-synovial, intra-hepatic, intralesional, intracranial, intraperitoneal, intranasal, or intraocular injections or other modes of delivery.

[1475] For injection, the agents of the disclosure may be formulated and diluted in aqueous solutions, such as in physiologically compatible buffers such as Hank's solution, Ringer's solution, or physiological saline buffer. For such transmucosal administration, penetrants appropriate to the barrier to be permeated are used in the formulation. Such penetrants are generally known in the art.

[1476] Use of pharmaceutically acceptable inert carriers to formulate the compounds herein disclosed for the practice of the disclosure into dosages suitable for systemic administration is within the scope of the disclosure. With proper choice of carrier and suitable manufacturing practice, the compositions of the present disclosure, in particular, those formulated as solutions, may be administered parenterally, such as by intravenous injection.

[1477] The compounds can be formulated readily using pharmaceutically acceptable carriers well known in the art into dosages suitable for oral administration. Such carriers enable the compounds of the disclosure to be formulated as tablets, pills, capsules, liquids, gels, syrups, slurries, suspensions and the like, for oral ingestion by a subject (e.g., patient) to be treated.

[1478] For nasal or inhalation delivery, the agents of the disclosure may also be formulated by methods known to those of skill in the art, and may include, for example, but not limited to, examples of solubilizing, diluting, or dispersing substances such as, saline, preservatives, such as benzyl alcohol, absorption promoters, and fluorocarbons.

[1479] In certain embodiments, oligonucleotides and compositions are delivered to the CNS. In certain embodiments, oligonucleotides and compositions are delivered to the cerebrospinal fluid. In certain embodiments, oligonucleotides and compositions are administered to the brain parenchyma. In certain embodiments, oligonucleotides and compositions are delivered to an animal/subject by intrathecal administration, or intracerebroventricular administration. Broad distribution of oligonucleotides and compositions, described herein, within the central nervous system may be achieved with intraparenchymal administration, intrathecal administration, or intracerebroventricular administration.

[1480] In certain embodiments, parenteral administration is by injection, by, e.g., a syringe, a pump, etc. In certain embodiments, the injection is a bolus injection. In certain embodiments, the injection is administered directly to a tissue, such as striatum, caudate, cortex, hippocampus and cerebellum.

[1481] In certain embodiments, methods of specifically localizing a pharmaceutical agent, such as by bolus injection, decreases median effective concentration (EC50) by a factor of 20, 25, 30, 35, 40, 45 or 50. In certain embodiments, the pharmaceutical agent in an antisense compound as further described herein. In certain embodiments, the targeted tissue is brain tissue. In certain embodiments the targeted tissue is striatal tissue. In certain embodiments, decreasing EC50 is desirable because it reduces the dose required to achieve a pharmacological result in a patient in need thereof.

[1482] In certain embodiments, an antisense oligonucleotide is delivered by injection or infusion once every month, every two months, every 90 days, every 3 months, every 6 months, twice a year or once a year.

[1483] Pharmaceutical compositions suitable for use in the present disclosure include compositions wherein the active ingredients are contained in an effective amount to achieve its intended purpose. Determination of the effective amounts is well within the capability of those skilled in the art, especially in light of the detailed disclosure provided herein.

[1484] In addition to the active ingredients, these pharmaceutical compositions may contain suitable pharmaceutically acceptable carriers comprising excipients and auxiliaries which facilitate processing of the active compounds into preparations which can be used pharmaceutically. The preparations formulated for oral administration may be in the form of tablets, dragees, capsules, or solutions.

[1485] Pharmaceutical preparations for oral use can be obtained by combining the active compounds with solid excipients, optionally grinding a resulting mixture, and processing the mixture of granules, after adding suitable auxiliaries, if desired, to obtain tablets or dragee cores. Suitable excipients are, in particular, fillers such as sugars, including lactose, sucrose, mannitol, or sorbitol; cellulose preparations, for example, maize starch, wheat starch, rice starch, potato starch, gelatin, gum tragacanth, methyl cellulose, hydroxypropylmethyl-cellulose, sodium carboxymethyl-cellulose (CMC), and/or polyvinylpyrrolidone (PVP: povidone). If desired, disintegrating agents may be added, such as the cross-linked polyvinylpyrrolidone, agar, or alginic acid or a salt thereof such as sodium alginate.

[1486] Dragee cores are provided with suitable coatings. For this purpose, concentrated sugar solutions may be used, which may optionally contain gum arabic, talc, polyvinylpyrrolidone, carbopol gel, polyethylene glycol (PEG), and/or titanium dioxide, lacquer solutions, and suitable organic solvents or solvent mixtures. Dye-stuffs or pigments may be added to the tablets or dragee coatings for identification or to characterize different combinations of active compound doses.

[1487] Pharmaceutical preparations that can be used orally include push-fit capsules made of gelatin, as well as soft, sealed capsules made of gelatin, and a plasticizer, such as glycerol or sorbitol. The push-fit capsules can contain the active ingredients in admixture with filler such as lactose, binders such as starches, and/or lubricants such as talc or magnesium stearate and, optionally, stabilizers. In soft capsules, the active compounds may be dissolved or suspended in suitable liquids, such as fatty oils, liquid paraffin, or liquid polyethylene glycols (PEGs). In addition, stabilizers may be added.

[1488] Depending upon the particular condition, or disease state, to be treated or prevented, additional therapeutic agents, which are normally administered to treat or prevent that condition, may be administered together with oligonucleotides of this disclosure. For example, chemotherapeutic agents or other anti-proliferative agents may be combined with the oligonucleotides of this disclosure to treat proliferative diseases and cancer. Examples of known chemotherapeutic agents include, but are not limited to, adriamycin, dexamethasone, vincristine, cyclophosphamide, fluorouracil, topotecan, taxol, interferons, and platinum derivatives.

[1489] The function and advantage of these and other embodiments of the present disclosure will be more fully understood from the examples described below. The following examples are intended to illustrate the benefits of the present disclosure, but do not exemplify the full scope of the disclosure.

### Targeting Components

[1490] In some embodiments, a provided composition further comprises a targeting component. A targeting component can be either conjugated or not conjugated to a lipid or a biologically active agent. In some embodiments, a targeting component is conjugated to a biologically active agent. In some embodiments, a biologically active agent is conjugated to both a lipid and a targeting component. As described in here, in some embodiments, a biologically active agent is a provided oligonucleotide. Thus, in some embodiments, a provided oligonucleotide composition further comprises, besides a lipid and oligonucleotides, a target elements. Various targeting components can be used in accordance with the present disclosure, e.g., lipids, antibodies, peptides, carbohydrates, etc. In some embodiments, provided oligonucleotides have the structure of A^{c}-[-L^{LD}-(R^{LD})ₐ]_{b}. In some embodiments, provided oligonucleotides have the structure of [(A^{c})ₐ-L^{LD}]_{b}—R^{LD}. In some embodiments, L^{LD}, R^{LD} combinations of L^{LD} and R^{LD}, or -[-L^{LD}-(R^{LD})ₐ]_{b} comprises one or more targeting components.

[1491] In some embodiments, a targeting component interacts with a protein on the surface of targeted cells. In some embodiments, such interaction facilitates internalization into targeted cells. In some embodiments, a targeting component comprises a sugar moiety. In some embodiments, a targeting component comprises a polypeptide moiety. In some embodiments, a targeting component comprises an antibody. In some embodiments, a targeting component is an antibody. In some embodiments, a targeting component comprises an inhibitor. In some embodiments, a targeting component is a moiety from a small molecule inhibitor. In some embodiments, an inhibitor is an inhibitor of a protein on the surface of targeted cells. In some embodiments, an inhibitor is a carbonic anhydrase inhibitor. In some embodiments, an inhibitor is a carbonic anhydrase inhibitor expressed on the surface of target cells. In some embodiments, a carbonic anhydrase is I, II, III, IV, V, VI, VII, VIII, IX, X, XI, XII, XIII, XIV, XV or XVI. In some embodiments, a carbonic anhydrase is membrane bound. In some embodiments, a carbonic anhydrase is IV, IX, XII or XIV. In some embodiments, an inhibitor is for IV, IX, XII and/or XIV. In some embodiments, an inhibitor is a carbonic anhydrase III inhibitor. In some embodiments, an inhibitor is a carbonic anhydrase IV inhibitor. In some embodiments, an inhibitor is a carbonic anhydrase IX inhibitor. In some embodiments, an inhibitor is a carbonic anhydrase XII inhibitor. In some embodiments, an inhibitor is a carbonic anhydrase XIV inhibitor. In some embodiments, an inhibitor comprises or is a sulfonamide (e.g., those described in Supuran, CT. Nature Rev Drug Discover 2008, 7, 168-181, which sulfonamides are incorporated herein by reference). In some embodiments, an inhibitor is a sulfonamide. In some embodiments, targeted cells are muscle cells.

[1492] In some embodiments, a targeting component is R^{LD} as defined and described in the present disclosure. In some embodiments, the present disclosure provides oligonucleotides comprising R^{LD}. In some embodiments, the present disclosure provides oligonucleotide compositions comprising oligonucleotides comprising R^{LD}. In some embodiments, the present disclosure provides oligonucleotide compositions comprising a first plurality of oligonucleotides comprising R^{LD}. In some embodiments, the present disclosure provides chirally controlled oligonucleotide compositions of oligonucleotides comprising R^{LD}. In some embodiments, R^{LD} comprises or is

[chemical structure]

In some embodiments, R^{LD} comprises or is

[chemical structure]

In some embodiments, R^{LD} comprises or is

[chemical structure]

In some embodiments, R^{LD} comprises or is

[chemical structure]

In some embodiments, R^{LD} comprises or is

[chemical structure]

In some embodiments, R^{LD} comprises or is

[chemical structure]

In some embodiments, R^{LD} comprises or is

[chemical structure]

In some embodiments, R^{LD} comprises or is

[chemical structure]

In some embodiments, R^{LD} comprises or is

[chemical structure]

In some embodiments, R^{LD} comprises or is

[chemical structure]

In some embodiments, R^{LD} comprises or is

[chemical structure]

In some embodiments, R^{LD} comprises or is

[chemical structure]

In some embodiments, R^{LD} comprises or is

[chemical structure]

In some embodiments R^{LD} comprises or is

[chemical structure]

In some embodiments, R^{LD} comprises or is

[chemical structure]

In some embodiments, X is O. In some embodiments, X is S.

[1493] In some embodiments, the present disclosure provides technologies (e.g., reagents, methods, etc.) for conjugating various moieties to oligonucleotide chains. In some embodiments, the present disclosure provides technologies for conjugating targeting component to oligonucleotide chains. In some embodiments, the present disclosure provides acids comprising targeting components for conjugation, e.g., R^{LD}—COOH. In some embodiments, the present disclosure provides linkers for conjugation, e.g., L^{LD}. A person having ordinary skill in the art understands that many known and widely practiced technologies can be utilized for conjugation with oligonucleotide chains in accordance with the present disclosure. In some embodiments, a provided acid is

[chemical structure]

In some embodiments, a provided acid is

[chemical structure]

In some embodiments, a provided acid is

[chemical structure]

In some embodiments, a provided acid is

[chemical structure]

In some embodiments, the present disclosure provides methods and reagents for preparing such acids.

[1494] In some embodiments, provided compounds, e.g., reagents, products (e.g., oligonucleotides, amidites, etc.) etc. are at least 10%, 20%, 30%, 40%, 50%, 60%, 70%, 75%, 80%, 81%, 82%, 83%, 84%, 85%, 86%, 87%, 88%, 89%, 90%, 91%, 92%, 93%, 94%, 95%, 96%, 97%, 97% or 99% pure. In some embodiments, the purity is at least 50%. In some embodiments, the purity is at least 75%. In some embodiments, the purity is at least 80%. In some embodiments, the purity is at least 85%. In some embodiments, the purity is at least 90%. In some embodiments, the purity is at least 95%. In some embodiments, the purity is at least 96%. In some embodiments, the purity is at least 97%. In some embodiments, the purity is at least 98%. In some embodiments, the purity is at least 99%.

[1495] Target components can be incorporated into provided technologies through many types of methods in accordance with the present disclosure. In some embodiments, target components are physically mixed with provided oligonucleotides to form provided compositions. In some embodiments, target components are chemically conjugated with oligonucleotides. In some embodiments, target components are chemically conjugated with oligonucleotides through a linker, for example, L^{LD}.

[1496] In some embodiments, provided compositions comprise two or more target components. In some embodiments, provided oligonucleotides comprise two or more conjugated target components. In some embodiments, the two or more conjugated target components are the same. In some embodiments, the two or more conjugated target components are different. In some embodiments, provided oligonucleotides comprise no more than one target component. In some embodiments, oligonucleotides of a provided composition comprise different types of conjugated target components. In some embodiments, oligonucleotides of a provided composition comprise the same type of target components.

[1497] Target components can be conjugated to oligonucleotides optionally through linkers. Various types of linkers in the art can be utilized in accordance of the present disclosure. In some embodiments, a linker comprise a phosphate group, which can, for example, be used for conjugating target components through chemistry similar to those employed in oligonucleotide synthesis. In some embodiments, a linker comprises an amide, ester, or ether group. In some embodiments, a linker has the structure of -L-. Target components can be conjugated through either the same or different linkers compared to lipids.

[1498] Target components, optionally through linkers, can be conjugated to oligonucleotides at various suitable locations. In some embodiments, target components are conjugated through the 5′-OH group. In some embodiments, target components are conjugated through the 3′-OH group. In some embodiments, target components are conjugated through one or more sugar moieties. In some embodiments, target components are conjugated through one or more bases. In some embodiments, target components are incorporated through one or more internucleotidic linkages. In some embodiments, an oligonucleotide may contain multiple conjugated target components which are independently conjugated through its 5′-OH, 3′-OH, sugar moieties, base moieties and/or internucleotidic linkages. Target components and lipids can be conjugated either at the same, neighboring and/or separated locations. In some embodiments, a target component is conjugated at one end of an oligonucleotide, and a lipid is conjugated at the other end.

### Example Uses

[1499] In some embodiments, the present disclosure encompasses the use of a composition comprising a lipid and a biologically active agent. In some embodiments, the present disclosure provides methods for delivering a biologically active agent to a target location comprising administering a provided composition. In some embodiments, a provided method delivers a biologically active agent into a cell. In some embodiments, a provided method delivers a biologically active agent into a muscle cell. In some embodiments, a provided method delivers a biologically active agent into a cell within a tissue. In some embodiments, a provided method delivers a biologically active agent into a cell within an organ. In some embodiments, a provided method delivers a biologically active agent into a cell within a subject, comprising administering to the subject a provided composition. In some embodiments, a provided method delivers a biologically active agent into cytoplasm. In some embodiments, a provided method delivers a biologically active agent into nucleus.

[1500] In some embodiments, the present disclosure pertains to methods related to the delivery of a biologically active agent to a muscle cell or tissue, or a muscle cell or tissue in a mammal (e.g., a human subject), which method pertains to a use of a composition comprising a biological agent and a lipid.

[1501] Biologically Active Agent: A Nucleic Acid

[1502] In some embodiments, the present disclosure pertains to compositions and methods related to a composition comprising a biologically active agent and a lipid comprising a C₁₀-C₄₀ linear, saturated or partially unsaturated, aliphatic chain. In some embodiments, the present disclosure pertains to compositions and methods related to a composition comprising a biologically active agent and a lipid comprising a C₁₀-C₄₀ linear, saturated or partially unsaturated, aliphatic chain, optionally substituted with one or more C₁₋₄ aliphatic group. In some embodiments, the present disclosure pertains to compositions and methods related to delivery of biologically active agents, wherein the compositions comprise a biologically active agent a lipid. In various embodiments, the lipid is selected from: lauric acid, myristic acid, palmitic acid, stearic acid, oleic acid, linoleic acid, alpha-linolenic acid, gamma-linolenic acid, docosahexaenoic acid (DHA or cis-DHA), turbinaric acid and dilinoleyl.

[1503] In some embodiments, a biologically active agent is a nucleic acid.

[1504] In some embodiments, a nucleic acid is an oligonucleotide, an antisense oligonucleotide, an RNAi agent, a miRNA, splice switching oligonucleotide (SSO), immunomodulatory nucleic acid, an aptamer, a ribozyme, a Piwi-interacting RNA (piRNA), a small nucleolar RNA (snoRNA), a mRNA, a lncRNA, a ncRNA, an antigomir (e.g., an antagonist to a miRNA, lncRNA, ncRNA or other nucleic acid), a plasmid, a vector, or a portion thereof.

[1505] In some embodiments, a nucleic acid is an oligonucleotide.

[1506] In some embodiments, the present disclosure pertains to: an oligonucleotide composition comprising a plurality of oligonucleotides, which share: 1) a common base sequence; 2) a common pattern of backbone linkages; and 3) a common pattern of backbone phosphorus modifications; wherein one or more oligonucleotides of the plurality are individually conjugated to a lipid. In some embodiments, the present disclosure pertains to: a chirally controlled oligonucleotide composition comprising a plurality of oligonucleotides, which share: 1) a common base sequence; 2) a common pattern of backbone linkages; and 3) a common pattern of backbone phosphorus modifications; wherein: the composition is chirally controlled in that the plurality of oligonucleotides share the same stereochemistry at one or more chiral internucleotidic linkages; one or more oligonucleotides of the plurality are individually conjugated to a lipid; and one or more oligonucleotides of the plurality are optionally and individually conjugated to a targeting compound or moiety. In some embodiments, the oligonucleotide is a splice-switching oligonucleotide. In some embodiments, the biologically active agent is an oligonucleotide capable of skipping or mediating skipping of an exon in a gene related to a muscle-related disease or disorder. In some embodiments, the biologically active agent is an oligonucleotide capable of skipping or mediating skipping of an exon in the dystrophin gene. In some embodiments, a common base sequence hybridizes with a transcript of dystrophin, myostatin, Huntingtin, a myostatin receptor, ActRIIB, ActRIIA, DMPK, Malat1, SMN2, dystrophia myotonica protein kinase (DMPK), Proprotein convertase subtilisin/kexin type 9 (PCSK9), SMAD7 or KRT14 (Keratin 14). In some embodiments, the sequence of the oligonucleotide comprises or consists of the sequence of any splice-switching oligonucleotide disclosed herein (e.g., in Table 4A).

[1507] In some embodiments, the plurality of oligonucleotides share the same stereochemistry at five or more chiral internucleotidic linkages. In some embodiments, the plurality of oligonucleotides share the same stereochemistry at ten or more chiral internucleotidic linkages. In some embodiments, the plurality of oligonucleotides share the same stereochemistry at each of the chiral internucleotidic linkages so that they share a common pattern of backbone chiral centers. In some embodiments, one or more oligonucleotides of the plurality are independently conjugated to a lipid through a 5′-OH on the oligonucleotide. In some embodiments, one or more oligonucleotides of the plurality are independently conjugated to a lipid through a 3′-OH on the oligonucleotide. In some embodiments, each oligonucleotide of the plurality is individually conjugated to a lipid. In some embodiments, each oligonucleotide of the plurality is individually conjugated to the same lipid. In some embodiments, the present disclosure pertains to: a composition comprising a biologically active agent and a lipid, wherein the agent is any agent disclosed herein, and wherein the lipid is any lipid disclosed herein. In some embodiments, each oligonucleotide of the plurality is individually conjugated to the same lipid at the same location. In some embodiments, a lipid is conjugated to an oligonucleotide through a linker. In some embodiments, one or more oligonucleotides of the plurality are independently conjugated to a targeting compound or moiety. In some embodiments, one or more oligonucleotides of the plurality are independently conjugated to a lipid and a targeting compound or moiety. In some embodiments, one or more oligonucleotides of the plurality are independently conjugated to a lipid at one end and a targeting compound or moiety at the other. In some embodiments, oligonucleotides of the plurality share the same chemical modification patterns. In some embodiments, oligonucleotides of the plurality share the same chemical modification patterns comprising one or more base modifications. In some embodiments, oligonucleotides of the plurality share the same chemical modification patterns comprising one or more sugar modifications. In some embodiments, the sequence of the oligonucleotide(s) comprises or consists of the sequence of any splice-switching oligonucleotide disclosed herein (e.g., in Table 4A).

[1508] In some embodiments, the plurality of oligonucleotides share a common pattern of sugar modification, which comprises 3 or more 2′-F. In some embodiments, the plurality of oligonucleotides share a common pattern of sugar modification, which comprises 3 or more consecutive 2′-F. In some embodiments, the plurality of oligonucleotides share a common pattern of sugar modification, which comprises 3 or more consecutive 2′-F within the 10 nucleotide at the 5′-end. In some embodiments, the plurality of oligonucleotides share a common pattern of sugar modification, which comprises 3 or more 2′-F within the 10 nucleotide at the 5′-end. In some embodiments, the plurality of oligonucleotides share a common pattern of sugar modification, which comprises 3 or more consecutive 2′-F at the 5′-end. In some embodiments, the plurality of oligonucleotides share a common pattern of sugar modification, which comprises 5 or more consecutive 2′-F within the first 10 nucleotide at the 3′-end. In some embodiments, the plurality of oligonucleotides share a common pattern of sugar modification, which comprises 5 or more 2′-F within the 10 nucleotide at the 3′-end. In some embodiments, the plurality of oligonucleotides share a common pattern of sugar modification, which comprises 7 or more consecutive 2′-F at the 3′-end. In some embodiments, the plurality of oligonucleotides share a common pattern of sugar modification, which comprises 3 or more consecutive 2′-F at the 5′-end, 3 or more consecutive 2′-F at the 3′-end, and 3 or more 2′-OR between the 5′-end 2′-F and the 3′-end 2′-F modifications. In some embodiments, the plurality of oligonucleotides share a common pattern of sugar modification, which comprises 3 or more 2′-F at the 5′-end, 3 or more 2′-F at the 3′-end, and 3 or more 2′-OR between the 5′-end 2′-F and the 3′-end 2′-F modifications. In some embodiments, the plurality of oligonucleotides share a common pattern of sugar modification, which comprises 5 or more 2′-F within the 10 nucleotides at the 5′-end. In some embodiments, the plurality of oligonucleotides share a common pattern of sugar modification, which comprises 3 or more consecutive 2′-F at the 5′-end. In some embodiments, the plurality of oligonucleotides share a common pattern of sugar modification, which comprises 7 or more 2′-F within the 10 nucleotides at the 3′-end. In some embodiments, the plurality of oligonucleotides share a common pattern of sugar modification, which comprises 5 or more consecutive 2′-F within the 10 nucleotides at the 3′-end. In some embodiments, the plurality of oligonucleotides share a common pattern of sugar modification, which comprises 7 or more consecutive 2′-F at the 3′-end. In some embodiments, the plurality of oligonucleotides comprises a 5′-wing-core-wing-3′ structure, wherein each wing region independently comprises 3 to 10 nucleosides, and the core region independently comprises 3 to 10 nucleosides. In some embodiments, the sequence of the oligonucleotide(s) comprises or consists of the sequence of any oligonucleotide disclosed herein (e.g., in Table 4A).

[1509] In some embodiments, the present disclosure pertains to: a method of delivering an oligonucleotide to a muscle cell or tissue in a human subject, comprising: (a) Providing a composition of any one of the preceding claims; and (b) Administering the composition to the human subject such that the oligonucleotide is delivered to a muscle cell or tissue in the subject. In some embodiments, the sequence of the oligonucleotide(s) comprises or consists of the sequence of any oligonucleotide disclosed herein (e.g., in Table 4A).

[1510] In some embodiments, the common base sequence is capable of hybridizing with a transcript in a muscle cell, which transcript contains a mutation that is linked to a muscle disease, or whose level, activity and/or distribution is linked to a muscle disease. In some embodiments, the common base sequence is capable of hybridizing with a transcript in a muscle cell, and the composition is characterized in that when it is contacted with the transcript in a transcript splicing system, splicing of the transcript is altered relative to that observed under reference conditions selected from the group consisting of absence of the composition, presence of a reference composition, and combinations thereof. In some embodiments, the common base sequence is capable of hybridizing with a transcript in a cell. In some embodiments, a common base sequence hybridizes with a transcript of dystrophin, myostatin, Huntingtin, a myostatin receptor, ActRIIB, ActRIIA, DMPK, Malat1, SMN2, dystrophia myotonica protein kinase (DMPK), Proprotein convertase subtilisin/kexin type 9 (PCSK9), SMAD7 or KRT14 (Keratin 14). In some embodiments, the common base sequence hybridizes with a transcript of dystrophin. In some embodiments, the common base sequence hybridizes with a transcript of dystrophin, and the composition increases the production of one or more functional or partially functional proteins encoded by dystrophin. In some embodiments, the sequence of the oligonucleotide(s) comprises or consists of the sequence of any oligonucleotide disclosed herein (e.g., in Table 4A).

[1511] In some embodiments, the oligonucleotide or oligonucleotides is or are splice switching oligonucleotide or oligonucleotides. In some embodiments, the sequence of the oligonucleotide(s) comprises or consists of the sequence of any oligonucleotide disclosed herein (e.g., in Table 4A).

[1512] In some embodiments, the present disclosure pertains to:

[1513] A method for inhibiting expression of a gene in a muscle cell or tissue in a mammal comprising preparing a composition comprising a lipid and an oligonucleotide (as a non-limiting example, a SSO) and administering the composition to the mammal.

[1514] A method of treating a disease that is caused by the over-expression of one or several proteins in a muscle cell or tissue in a subject, said method comprising the administration of a composition comprising a lipid and an oligonucleotide (as a non-limiting example, a SSO).

[1515] A method of treating a disease that is caused by a reduced, suppressed or missing expression of one or several proteins in a subject, said method comprising the administration of a composition comprising a lipid and an oligonucleotide (as a non-limiting example, a SSO).

[1516] A method for treating a sign and/or symptom of a disease, disorder, or condition related to a muscle-related disorder or disease in a subject by providing a composition comprising a lipid and an oligonucleotide (as a non-limiting example, a SSO) and administering a therapeutically effective amount of the composition to the subject.

[1517] A method of administering a biologically active agent to a subject in need thereof, comprising steps of providing a composition comprising a biologically active agent and a lipid, and administering the composition to the subject, wherein the biologically active compound is an oligonucleotide (as a non-limiting example, a SSO), and wherein the lipid is any lipid disclosed herein.

[1518] A method of treating a disease in a subject, the method comprising steps of providing a composition comprising a biologically active agent and a lipid, and administering a therapeutically effective amount of the composition to the subject, wherein the biologically active compound is an oligonucleotide (as a non-limiting example, a SSO), and wherein the lipid is any lipid disclosed herein, and wherein the disease is any disease disclosed herein.

[1519] A method for inhibiting expression of a gene in a muscle cell or tissue in a mammal, wherein the gene is related to a muscle-related disease or disorder, the method comprising steps of preparing a composition comprising a lipid and an oligonucleotide (as a non-limiting example, a SSO) and administering the composition to the mammal.

[1520] A method of treating a disease that is caused by the over-expression of one or several proteins in a muscle cell or tissue in a subject, said method comprising the administration of a composition comprising a lipid and an oligonucleotide (as a non-limiting example, a SSO).

[1521] A method of treating a disease that is caused by a reduced, suppressed or missing expression of one or several proteins in a muscle in a subject, said method comprising the administration of a composition comprising a lipid and an oligonucleotide (as a non-limiting example, a SSO).

[1522] A method for treating a sign and/or symptom of a disease, disorder, or condition related to a muscle-related disorder or disease in a subject by providing a composition comprising a lipid and an oligonucleotide (as a non-limiting example, a SSO) and administering a therapeutically effective amount of the composition to the subject.

[1523] A method of administering a biologically active agent to a subject in need thereof, comprising steps of providing a composition comprising a biologically active agent and a lipid, and administering the composition to the subject, wherein the biologically active compound is an oligonucleotide (as a non-limiting example, a SSO), and wherein the lipid is any lipid disclosed herein.

[1524] A method of treating a muscle-related disease or disorder in a subject, the method comprising steps of providing a composition comprising a biologically active agent and a lipid, and administering a therapeutically effective amount of the composition to the subject, wherein the biologically active compound is an oligonucleotide (as a non-limiting example, a SSO), and wherein the lipid is any lipid disclosed herein.

[1525] A method for skipping an exon in a gene in a muscle cell or tissue in a mammal, the method comprising steps of preparing a composition comprising a lipid and a splice-switching oligonucleotide and administering the composition to the mammal.

[1526] A method of treating a disease related to an exon comprising a mutation in a gene, said method comprising the administration of a composition comprising a lipid and a splice-switching oligonucleotide, wherein the splice-switching oligonucleotide is capable of skipping or mediating skipping the exon comprising the mutation. In some embodiments, the disease is a muscle-related disease.

[1527] A method of treating a disease that is caused by a mutation in an exon in a gene, said method comprising the administration of a composition comprising a lipid and an oligonucleotide, wherein the oligonucleotide is capable of skipping or mediating skipping the exon comprising the mutation. In some embodiments, the disease is a muscle-related disease.

[1528] A method for treating a sign and/or symptom of a disease, disorder, or condition related to a muscle-related disorder or disease in a subject by providing a composition comprising a lipid and an oligonucleotide (as a non-limiting example, a SSO) and administering a therapeutically effective amount of the composition to the subject.

[1529] A method of administering a biologically active agent to a subject in need thereof, comprising steps of providing a composition comprising a biologically active agent and a lipid, and administering the composition to the subject, wherein the oligonucleotide is capable of skipping or mediating skipping an exon comprising a mutation, and wherein the lipid is any lipid disclosed herein.

[1530] A method of treating a muscle-related disease or disorder in a subject, wherein the disease or disorder is related to an exon comprising a mutation in a gene, the method comprising steps of providing a composition comprising an oligonucleotide and a lipid, and administering a therapeutically effective amount of the composition to the subject, wherein the oligonucleotide is capable of skipping or mediating skipping the exon comprising the mutation, and wherein the lipid is any lipid disclosed herein.

[1531] A method for skipping an exon in the dystrophin gene in a muscle cell or tissue in a mammal, the method comprising steps of preparing a composition comprising a lipid and a splice-switching oligonucleotide and administering the composition to the mammal.

[1532] A method of treating a disease related to an exon comprising a mutation in the dystrophin gene, said method comprising the administration of a composition comprising a lipid and a splice-switching oligonucleotide, wherein the splice-switching oligonucleotide is capable of skipping or mediating skipping the exon comprising the mutation.

[1533] A method of treating a disease that is caused by a mutation in an exon in the dystrophin gene, said method comprising the administration of a composition comprising a lipid and an oligonucleotide, wherein the oligonucleotide is capable of skipping or mediating skipping the exon comprising the mutation.

[1534] A method for treating a sign and/or symptom of a disease, disorder, or condition related to a muscle-related disorder or disease in a subject by providing a composition comprising a lipid and an oligonucleotide (as a non-limiting example, a SSO) and administering a therapeutically effective amount of the composition to the subject.

[1535] A method of administering a biologically active agent to a subject in need thereof, comprising steps of providing a composition comprising a biologically active agent and a lipid, and administering the composition to the subject, wherein the oligonucleotide is capable of skipping or mediating skipping the exon comprising the mutation, and wherein the lipid is any lipid disclosed herein.

[1536] A method of treating Duchenne muscular dystrophy in a subject, wherein the Duchenne muscular dystrophy is related to a mutation in an exon in the dystrophin gene, the method comprising steps of providing a composition comprising an oligonucleotide and a lipid, and administering a therapeutically effective amount of the composition to the subject, wherein the oligonucleotide is capable of skipping or mediating skipping the exon comprising the mutation, and wherein the lipid is any lipid disclosed herein.

[1537] A method for skipping an exon in the dystrophin gene in a muscle cell or tissue in a mammal, the method comprising steps of preparing a composition comprising a lipid and a splice-switching oligonucleotide and administering the composition to the mammal, wherein the lipid is any lipid disclosed herein, and wherein the sequence of the splice-switching oligonucleotide comprises or consists of the sequence of any splice-switching oligonucleotide disclosed herein (e.g., in Table 4A).

[1538] A method of treating a disease related to an exon comprising a mutation in the dystrophin gene, said method comprising the administration of a composition comprising a lipid and a splice-switching oligonucleotide, wherein the splice-switching oligonucleotide is capable of skipping or mediating skipping the exon comprising the mutation, wherein the lipid is any lipid disclosed herein, and wherein the sequence of the splice-switching oligonucleotide comprises or consists of the sequence of any splice-switching oligonucleotide disclosed herein (e.g., in Table 4A).

[1539] A method of treating a disease that is caused by a mutation in an exon in the dystrophin gene, said method comprising the administration of a composition comprising a lipid and an oligonucleotide, wherein the oligonucleotide is capable of skipping or mediating skipping the exon comprising the mutation, wherein the lipid is any lipid disclosed herein, and wherein the oligonucleotide comprises or consists of the sequence of any splice-switching oligonucleotide disclosed herein (e.g., in Table 4A).

[1540] A method for treating a sign and/or symptom of a disease, disorder, or condition related to a muscle-related disorder or disease in a subject by providing a composition comprising a lipid and an oligonucleotide (as a non-limiting example, a SSO) and administering a therapeutically effective amount of the composition to the subject, wherein the lipid is any lipid disclosed herein, and wherein the sequence of the oligonucleotide comprises or consists of the sequence of any splice-switching oligonucleotide disclosed herein (e.g., in Table 4A).

[1541] A method of administering a biologically active agent to a subject in need thereof, comprising steps of providing a composition comprising a biologically active agent and a lipid, and administering the composition to the subject, wherein the oligonucleotide is capable of skipping or mediating skipping the exon comprising the mutation, and wherein the lipid is any lipid disclosed herein, wherein the lipid is any lipid disclosed herein, and wherein the sequence of the oligonucleotide comprises or consists of the sequence of any splice-switching oligonucleotide disclosed herein (e.g., in Table 4A).

[1542] A method of treating Duchenne muscular dystrophy in a subject, wherein the Duchenne muscular dystrophy is related to a mutation in an exon in the dystrophin gene, the method comprising steps of providing a composition comprising an oligonucleotide and a lipid, and administering a therapeutically effective amount of the composition to the subject, wherein the oligonucleotide is capable of skipping or mediating skipping the exon comprising the mutation, and wherein the lipid is any lipid disclosed herein, and wherein the oligonucleotide comprises or consists of the sequence of any splice-switching oligonucleotide disclosed herein (e.g., in Table 4A).

[1543] In some individuals with muscular dystrophy, an exon in the dystrophin gene comprises a mutation; in many cases, this mutation causes a frameshift, which can lead to a premature stop codon. This prematurely terminated dystrophin is not full-length and thus cannot perform all the necessary functions of this protein. In some treatments for muscular dystrophy, an oligonucleotide (e.g., a splice-switching oligonucleotide) is capable of skipping or causing the skipping of one or more exons comprising a mutation; this allows the expression of a shortened dystrophin gene product, which lacks the portion corresponding to the skipped exon(s), but is otherwise functional. A non-limiting example of muscular dystrophy is Duchenne muscular dystrophy (DMD). A non-limiting example of an exon comprising a mutation causing a frameshift mutation and a premature stop is exon 51 of the dystrophin gene.

[1544] In some embodiments, a biologically active agent comprises or consists of or is an oligonucleotide or oligonucleotide composition or chirally controlled oligonucleotide composition, wherein the sequence of the oligonucleotide comprises or consists of the sequence of an oligonucleotide capable of skipping or mediating skipping of exon 51, 45, 53 or 44 in the dystrophin gene.

[1545] Various oligonucleotides are listed in Table 4A. Many of these are capable of skipping or mediating skipping of exon 51 of the human dystrophin gene, as shown in data presented in U.S. Pat. Application No. 62/239,839, filed Oct. 9, 2015, which is incorporated by reference in its entirety; and in data shown here.

[1546] Various oligonucleotides particularly capable of mediating skipping of exon 51 of human dystrophin include: WV-887, WV-896, WV-1709, WV-1710, WV-1714, WV-2095, WV-2100, WV-2106, WV-2107, WV-2108, WV-2109, WV-2223, WV-2224, WV-2225, WV-2226, WV-2227, WV-2228, WV-2229, WV-2230, WV-2438, WV-2444, WV-2445, WV-2526, WV-2527, WV-2528, WV-2529, WV-2530, WV-2533, among others. Thus, any composition or method described herein can comprise a biologically active agent, wherein the biologically active agent is selected from: WV-887, WV-896, WV-1709, WV-1710, WV-1714, WV-2095, WV-2100, WV-2106, WV-2107, WV-2108, WV-2109, WV-2223, WV-2224, WV-2225, WV-2226, WV-2227, WV-2228, WV-2229, WV-2230, WV-2438, WV-2444, WV-2445, WV-2526, WV-2527, WV-2528, WV-2529, WV-2530, WV-2533, or any other nucleic acid disclosed herein (including, but not limited to, those listed in Table 4A).

[1547] In some embodiments, a provided oligonucleotide is selected from those presented in the tables in the present disclosure, wherein the oligonucleotide is conjugated to a lipid and optionally a target component.

TABLE 4A
Example Oligonucleotides.

| WAVE ID | Base Sequence | SEQ ID NO: | Description | SEQ ID NO: | Stereochemistry¹ | Notes | Target/Program |
|---|---|---|---|---|---|---|---|
| ONT- | UCAAGGAAGA | 205 | mU*SmC*SmA*SmA*SmG*SmG*SmA | 957 | SSSSSSSSSSSSSS | Chiral version of | DMD |
| 395 | UGGCAUUUCU | | *SmA*SmG*SmA*SmU*SmG*SmG*Sm | | SSSSS | PRO051 (Drisapersen) | |
| | | | C*SmA*SmU*SmU*SmU*SmC*SmU | | | | |
| WV-942 | UCAAGGAAGA | 206 | mU*mC*mA*mA*mG*mG*mA*mA*m | 958 | XXXXXXXXXX | PRO051 (Drisapersen) | DMD |
| | UGGCAUUUCU | | G*mA*mU*mG*mG*mC*mA*mU*mU* | | XXXXXXXXX | | |
| | | | mU*mC*mU | | | | |
| WV-943 | GGCCAAACCUC | 207 | mG*mG*mC*mC*mA*mA*mA*mC*m | 959 | XXXXXXXXXX | Exon 23 control | DMD |
| | GGCUUACCU | | C*mU*mC*mG*mG*mC*mU*mU*mA* | | XXXXXXXXX | | |
| | | | mC*mC*mU | | | | |
| WV- | CUCCAACAUCA | 208 | mC*mU*mC*mC*mA*mA*mC*mA*m | 960 | XXXXXXXXXX | eteplirsen-all-2′-Me | DMD |
| 2165 | AGGAAGAUGG | | U*mC*mA*mA*mG*mG*mA*mA*mG* | | XXXXXXXXXX | 30mer | |
| | CAUUUCUAG | | mA*mU*mG*mG*mC*mA*mU*mU*m | | XXXXXXXXX | | |
| | | | U*mC*mU*mA*mG | | | | |
| WV- | ACCAGAGUAA | 209 | mA*mC*mC*mA*mG*mA*mG*mU*m | 961 | XXXXXXXXXX | 25-mer 2′-OMethyl | DMD |
| 2179 | CAGUCUGAGU | | A*mA*mC*mA*mG*mU*mC*mU*mG* | | XXXXXXXXXX | | |
| | AGGAG | | mA*mG*mU*mA*mG*mG*mA*mG | | XXXX | | |
| WV- | CACCAGAGUA | 210 | mC*mA*mC*mC*mA*mG*mA*mG*m | 962 | XXXXXXXXXX | 25-mer 2′-OMethyl | DMD |
| 2180 | ACAGUCUGAG | | U*mA*mA*mC*mA*mG*mU*mC*mU* | | XXXXXXXXXX | | |
| | UAGGA | | mG*mA*mG*mU*mA*mG*mG*mA | | XXXX | | |
| WV- | UCACCAGAGU | 211 | mU*mC*mA*mC*mC*mA*mG*mA*m | 963 | XXXXXXXXXX | 25-mer 2′-OMethyl | DMD |
| 2181 | AACAGUCUGA | | G*mU*mA*mA*mC*mA*mG*mU*mC* | | XXXXXXXXXX | | |
| | GUAGG | | mU*mG*mA*mG*mU*mA*mG*mG | | XXXX | | |
| WV- | GUCACCAGAG | 212 | mG*mU*mC*mA*mC*mC*mA*mG*m | 964 | XXXXXXXXXX | 25-mer 2′-OMethyl | DMD |
| 2182 | UAACAGUCUG | | A*mG*mU*mA*mA*mC*mA*mG*mU* | | XXXXXXXXXX | | |
| | AGUAG | | mC*mU*mG*mA*mG*mU*mA*mG | | XXXX | | |
| WV- | GUUGUGUCAC | 213 | mG*mU*mU*mG*mU*mG*mU*mC*m | 965 | XXXXXXXXXX | 25-mer 2′-OMethyl | DMD |
| 2183 | CAGAGUAACA | | A*mC*mC*mA*mG*mA*mG*mU*mA* | | XXXXXXXXXX | | |
| | GUCUG | | mA*mC*mA*mG*mU*mC*mU*mG | | XXXX | | |
| WV- | GGUUGUGUCA | 214 | mG*mG*mU*mU*mG*mU*mG*mU*m | 966 | XXXXXXXXXX | 25-mer 2′-OMethyl | DMD |
| 2184 | CCAGAGUAAC | | C*mA*mC*mC*mA*mG*mA*mG*mU* | | XXXXXXXXXX | | |
| | AGUCU | | mA*mA*mC*mA*mG*mU*mC*mU | | XXXX | | |
| WV- | AGGUUGUGUC | 215 | mA*mG*mG*mU*mU*mG*mU*mG*m | 967 | XXXXXXXXXX | 25-mer 2′-OMethyl | DMD |
| 2185 | ACCAGAGUAA | | U*mC*mA*mC*mC*mA*mG*mA*mG* | | XXXXXXXXXX | | |
| | CAGUC | | mU*mA*mA*mC*mA*mG*mU*mC | | XXXX | | |
| WV- | CAGGUUGUGU | 216 | mC*mA*mG*mG*mU*mU*mG*mU*m | 968 | XXXXXXXXXX | 25-mer 2′-OMethyl | DMD |
| 2186 | CACCAGAGUA | | G*mU*mC*mA*mC*mC*mA*mG*mA* | | XXXXXXXXXX | | |
| | ACAGU | | mG*mU*mA*mA*mC*mA*mG*mU | | XXXX | | |
| WV- | ACAGGUUGUG | 217 | mA*mC*mA*mG*mG*mU*mU*mG*m | 969 | XXXXXXXXXX | 25-mer 2′-OMethyl | DMD |
| 2187 | UCACCAGAGU | | U*mG*mU*mC*mA*mC*mC*mA*mG* | | XXXXXXXXXX | | |
| | AACAG | | mA*mG*mU*mA*mA*mC*mA*mG | | XXXX | | |
| WV- | CCACAGGUUG | 218 | mC*mC*mA*mC*mA*mG*mG*mU*m | 970 | XXXXXXXXXX | 25-mer 2′-OMethyl | DMD |
| 2188 | UGUCACCAGA | | U*mG*mU*mG*mU*mC*mA*mC*mC* | | XXXXXXXXXX | | |
| | GUAAC | | mA*mG*mA*mG*mU*mA*mA*mC | | XXXX | | |
| WV- | ACCACAGGUU | 219 | mA*mC*mC*mA*mC*mA*mG*mG*m | 971 | XXXXXXXXXX | 25-mer 2′-OMethyl | DMD |
| 2189 | GUGUCACCAG | | U*mU*mG*mU*mG*mU*mC*mA*mC* | | XXXXXXXXXX | | |
| | AGUAA | | mC*mA*mG*mA*mG*mU*mA*mA | | XXXX | | |
| WV- | AACCACAGGU | 220 | mA*mA*mC*mC*mA*mC*mA*mG*m | 972 | XXXXXXXXXX | 25-mer 2′-OMethyl | DMD |
| 2190 | UGUGUCACCA | | G*mU*mU*mG*mU*mG*mU*mC*mA* | | XXXXXXXXXX | | |
| | GAGUA | | mC*mC*mA*mG*mA*mG*mU*mA | | XXXX | | |
| WV- | UAACCACAGG | 221 | mU*mA*mA*mC*mC*mA*mC*mA*m | 973 | XXXXXXXXXX | 25-mer 2′-OMethyl | DMD |
| 2191 | UUGUGUCACC | | G*mG*mU*mU*mG*mU*mG*mU*mC* | | XXXXXXXXXX | | |
| | AGAGU | | mA*mC*mC*mA*mG*mA*mG*mU | | XXXX | | |
| WV- | GUAACCACAG | 222 | mG*mU*mA*mA*mC*mC*mA*mC*m | 974 | XXXXXXXXXX | 25-mer 2′-OMethyl | DMD |
| 2192 | GUUGUGUCAC | | A*mG*mG*mU*mU*mG*mU*mG*mU | | XXXXXXXXXX | | |
| | CAGAG | | *mC*mA*mC*mC*mA*mG*mA*mG | | XXXX | | |
| WV- | AGUAACCACA | 223 | mA*mG*mU*mA*mA*mC*mC*mA*m | 975 | XXXXXXXXXX | 25-mer 2′-OMethyl | DMD |
| 2193 | GGUUGUGUCA | | C*mA*mG*mG*mU*mU*mG*mU*mG* | | XXXXXXXXXX | | |
| | CCAGA | | mU*mC*mA*mC*mC*mA*mG*mA | | XXXX | | |
| WV- | UAGUAACCAC | 224 | mU*mA*mG*mU*mA*mA*mC*mC*m | 976 | XXXXXXXXXX | 25-mer 2′-OMethyl | DMD |
| 2194 | AGGUUGUGUC | | A*mC*mA*mG*mG*mU*mU*mG*mU* | | XXXXXXXXXX | | |
| | ACCAG | | mG*mU*mC*mA*mC*mC*mA*mG | | XXXX | | |
| WV- | UUAGUAACCA | 225 | mU*mU*mA*mG*mU*mA*mA*mC*m | 977 | XXXXXXXXXX | 25-mer 2′-OMethyl | DMD |
| 2195 | CAGGUUGUGU | | C*mA*mC*mA*mG*mG*mU*mU*mG* | | XXXXXXXXXX | | |
| | CACCA | | mU*mG*mU*mC*mA*mC*mC*mA | | XXXX | | |
| WV- | CUUAGUAACC | 226 | mC*mU*mU*mA*mG*mU*mA*mA*m | 978 | XXXXXXXXXX | 25-mer 2′-OMethyl | DMD |
| 2196 | ACAGGUUGUG | | C*mC*mA*mC*mA*mG*mG*mU*mU* | | XXXXXXXXXX | | |
| | UCACC | | mG*mU*mG*mU*mC*mA*mC*mC | | XXXX | | |
| WV- | CCUUAGUAACC | 227 | mC*mC*mU*mU*mA*mG*mU*mA*m | 979 | XXXXXXXXXX | 25-mer 2′-OMethyl | DMD |
| 2197 | ACAGGUUGUG | | A*mC*mC*mA*mC*mA*mG*mG*mU* | | XXXXXXXXXX | | |
| | UCAC | | mU*mG*mU*mG*mU*mC*mA*mC | | XXXX | | |
| WV- | UCCUUAGUAA | 228 | mU*mC*mC*mU*mU*mA*mG*mU*m | 980 | XXXXXXXXXX | 25-mer 2′-OMethyl | DMD |
| 2198 | CCACAGGUUG | | A*mA*mC*mC*mA*mC*mA*mG*mG* | | XXXXXXXXXX | | |
| | UGUCA | | mU*mU*mG*mU*mG*mU*mC*mA | | XXXX | | |
| WV- | GUUUCCUUAG | 229 | mG*mU*mU*mU*mC*mC*mU*mU*m | 981 | XXXXXXXXXX | 25-mer 2′-OMethyl | DMD |
| 2199 | UAACCACAGG | | A*mG*mU*mA*mA*mC*mC*mA*mC* | | XXXXXXXXXX | | |
| | UUGUG | | mA*mG*mG*mU*mU*mG*mU*mG | | XXXX | | |
| WV- | AGUUUCCUUA | 230 | mA*mG*mU*mU*mU*mC*mC*mU*m | 982 | XXXXXXXXXX | 25-mer 2′-OMethyl | DMD |
| 2200 | GUAACCACAG | | U*mA*mG*mU*mA*mA*mC*mC*mA* | | XXXXXXXXXX | | |
| | GUUGU | | mC*mA*mG*mG*mU*mU*mG*mU | | XXXX | | |
| WV- | CAGUUUCCUU | 231 | mC*mA*mG*mU*mU*mU*mC*mC*m | 983 | XXXXXXXXXX | 25-mer 2′-OMethyl | DMD |
| 2201 | AGUAACCACA | | U*mU*mA*mG*mU*mA*mA*mC*mC* | | XXXXXXXXXX | | |
| | GGUUG | | mA*mC*mA*mG*mG*mU*mU*mG | | XXXX | | |
| WV- | GCAGUUUCCU | 232 | mG*mC*mA*mG*mU*mU*mU*mC*m | 984 | XXXXXXXXXX | 25-mer 2′-OMethyl | DMD |
| 2202 | UAGUAACCAC | | C*mU*mU*mA*mG*mU*mA*mA*mC* | | XXXXXXXXXX | | |
| | AGGUU | | mC*mA*mC*mA*mG*mG*mU*mU | | XXXX | | |
| WV- | GGCAGUUUCC | 233 | mG*mG*mC*mA*mG*mU*mU*mU*m | 985 | XXXXXXXXXX | 25-mer 2′-OMethyl | DMD |
| 2203 | UUAGUAACCA | | C*mC*mU*mU*mA*mG*mU*mA*mA* | | XXXXXXXXXX | | |
| | CAGGU | | mC*mC*mA*mC*mA*mG*mG*mU | | XXXX | | |
| WV- | UGGCAGUUUC | 234 | mU*mG*mG*mC*mA*mG*mU*mU*m | 986 | XXXXXXXXXX | 25-mer 2′-OMethyl | DMD |
| 2204 | CUUAGUAACC | | U*mC*mC*mU*mU*mA*mG*mU*mA* | | XXXXXXXXXX | | |
| | ACAGG | | mA*mC*mC*mA*mC*mA*mG*mG | | XXXX | | |
| WV- | AUGGCAGUUU | 235 | mA*mU*mG*mG*mC*mA*mG*mU*m | 987 | XXXXXXXXXX | 25-mer 2′-OMethyl | DMD |
| 2205 | CCUUAGUAACC | | U*mU*mC*mC*mU*mU*mA*mG*mU* | | XXXXXXXXXX | | |
| | ACAG | | mA*mA*mC*mC*mA*mC*mA*mG | | XXXX | | |
| WV- | AGAUGGCAGU | 236 | mA*mG*mA*mU*mG*mG*mC*mA*m | 988 | XXXXXXXXXX | 25-mer 2′-OMethyl | DMD |
| 2206 | UUCCUUAGUA | | G*mU*mU*mU*mC*mC*mU*mU*mA* | | XXXXXXXXXX | | |
| | ACCAC | | mG*mU*mA*mA*mC*mC*mA*mC | | XXXX | | |
| WV- | GAGAUGGCAG | 237 | mG*mA*mG*mA*mU*mG*mG*mC*m | 989 | XXXXXXXXXX | 25-mer 2′-OMethyl | DMD |
| 2207 | UUUCCUUAGU | | A*mG*mU*mU*mU*mC*mC*mU*mU* | | XXXXXXXXXX | | |
| | AACCA | | mA*mG*mU*mA*mA*mC*mC*mA | | XXXX | | |
| WV- | GGAGAUGGCA | 238 | mG*mG*mA*mG*mA*mU*mG*mG*m | 990 | XXXXXXXXXX | 25-mer 2′-OMethyl | DMD |
| 2208 | GUUUCCUUAG | | C*mA*mG*mU*mU*mU*mC*mC*mU* | | XXXXXXXXXX | | |
| | UAACC | | mU*mA*mG*mU*mA*mA*mC*mC | | XXXX | | |
| WV- | UGGAGAUGGC | 239 | mU*mG*mG*mA*mG*mA*mU*mG*m | 991 | XXXXXXXXXX | 25-mer 2′-OMethyl | DMD |
| 2209 | AGUUUCCUUA | | G*mC*mA*mG*mU*mU*mU*mC*mC* | | XXXXXXXXXX | | |
| | GUAAC | | mU*mU*mA*mG*mU*mA*mA*mC | | XXXX | | |
| WV- | UUGGAGAUGG | 240 | mU*mU*mG*mG*mA*mG*mA*mU*m | 992 | XXXXXXXXXX | 25-mer 2′-OMethyl | DMD |
| 2210 | CAGUUUCCUU | | G*mG*mC*mA*mG*mU*mU*mU*mC* | | XXXXXXXXXX | | |
| | AGUAA | | mC*mU*mU*mA*mG*mU*mA*mA | | XXXX | | |
| WV- | UUUGGAGAUG | 241 | mU*mU*mU*mG*mG*mA*mG*mA*m | 993 | XXXXXXXXXX | 25-mer 2′-OMethyl | DMD |
| 2211 | GCAGUUUCCU | | U*mG*mG*mC*mA*mG*mU*mU*mU* | | XXXXXXXXXX | | |
| | UAGUA | | mC*mC*mU*mU*mA*mG*mU*mA | | XXXX | | |
| WV- | AGUUUGGAGA | 242 | mA*mG*mU*mU*mU*mG*mG*mA*m | 994 | XXXXXXXXXX | 25-mer 2′-OMethyl | DMD |
| 2212 | UGGCAGUUUC | | G*mA*mU*mG*mG*mC*mA*mG*mU* | | XXXXXXXXXX | | |
| | CUUAG | | mU*mU*mC*mC*mU*mU*mA*mG | | XXXX | | |
| WV- | UAGUUUGGAG | 243 | mU*mA*mG*mU*mU*mU*mG*mG*m | 995 | XXXXXXXXXX | 25-mer 2′-OMethyl | DMD |
| 2213 | AUGGCAGUUU | | A*mG*mA*mU*mG*mG*mC*mA*mG* | | XXXXXXXXXX | | |
| | CCUUA | | mU*mU*mU*mC*mC*mU*mU*mA | | XXXX | | |
| WV- | CUAGUUUGGA | 244 | mC*mU*mA*mG*mU*mU*mU*mG*m | 996 | XXXXXXXXXX | 25-mer 2′-OMethyl | DMD |
| 2214 | GAUGGCAGUU | | G*mA*mG*mA*mU*mG*mG*mC*mA* | | XXXXXXXXXX | | |
| | UCCUU | | mG*mU*mU*mU*mC*mC*mU*mU | | XXXX | | |
| WV- | UCUAGUUUGG | 245 | mU*mC*mU*mA*mG*mU*mU*mU*m | 997 | XXXXXXXXXX | 25-mer 2′-OMethyl | DMD |
| 2215 | AGAUGGCAGU | | G*mG*mA*mG*mA*mU*mG*mG*mC* | | XXXXXXXXXX | | |
| | UUCCU | | mA*mG*mU*mU*mU*mC*mC*mU | | XXXX | | |
| WV- | UUCUAGUUUG | 246 | mU*mU*mC*mU*mA*mG*mU*mU*m | 998 | XXXXXXXXXX | 25-mer 2′-OMethyl | DMD |
| 2216 | GAGAUGGCAG | | U*mG*mG*mA*mG*mA*mU*mG*mG | | XXXXXXXXXX | | |
| | UUUCC | | *mC*mA*mG*mU*mU*mU*mC*mC | | XXXX | | |
| WV- | CAUUUCUAGU | 247 | mC*mA*mU*mU*mU*mC*mU*mA*m | 999 | XXXXXXXXXX | 25-mer 2′-OMethyl | DMD |
| 2217 | UUGGAGAUGG | | G*mU*mU*mU*mG*mG*mA*mG*mA | | XXXXXXXXXX | | |
| | CAGUU | | *mU*mG*mG*mC*mA*mG*mU*mU | | XXXX | | |
| WV- | GCAUUUCUAG | 248 | mG*mC*mA*mU*mU*mU*mC*mU*m | 1000 | XXXXXXXXXX | 25-mer 2′-OMethyl | DMD |
| 2218 | UUUGGAGAUG | | A*mG*mU*mU*mU*mG*mG*mA*mG | | XXXXXXXXXX | | |
| | GCAGU | | *mA*mU*mG*mG*mC*mA*mG*mU | | XXXX | | |
| WV- | AUGGCAUUUC | 249 | mA*mU*mG*mG*mC*mA*mU*mU*m | 1001 | XXXXXXXXXX | 25-mer 2′-OMethyl | DMD |
| 2219 | UAGUUUGGAG | | U*mC*mU*mA*mG*mU*mU*mU*mG* | | XXXXXXXXXX | | |
| | AUGGC | | mG*mA*mG*mA*mU*mG*mG*mC | | XXXX | | |
| WV- | GAAGAUGGCA | 250 | mG*mA*mA*mG*mA*mU*mG*mG*m | 1002 | XXXXXXXXXX | 25-mer 2′-OMethyl | DMD |
| 2220 | UUUCUAGUUU | | C*mA*mU*mU*mU*mC*mU*mA*mG* | | XXXXXXXXXX | | |
| | GGAGA | | mU*mU*mU*mG*mG*mA*mG*mA | | XXXX | | |
| WV- | AGGAAGAUGG | 251 | mA*mG*mG*mA*mA*mG*mA*mU*m | 1003 | XXXXXXXXXX | 25-mer 2′-OMethyl | DMD |
| 2221 | CAUUUCUAGU | | G*mG*mC*mA*mU*mU*mU*mC*mU* | | XXXXXXXXXX | | |
| | UUGGA | | mA*mG*mU*mU*mU*mG*mG*mA | | XXXX | | |
| WV- | AAGGAAGAUG | 252 | mA*mA*mG*mG*mA*mA*mG*mA*m | 1004 | XXXXXXXXXX | 25-mer 2′-OMethyl | DMD |
| 2222 | GCAUUUCUAG | | U*mG*mG*mC*mA*mU*mU*mU*mC* | | XXXXXXXXXX | | |
| | UUUGG | | mU*mA*mG*mU*mU*mU*mG*mG | | XXXX | | |
| WV- | CAAGGAAGAU | 253 | mC*mA*mA*mG*mG*mA*mA*mG*m | 1005 | XXXXXXXXXX | 25-mer 2′-OMethyl | DMD |
| 2223 | GGCAUUUCUA | | A*mU*mG*mG*mC*mA*mU*mU*mU* | | XXXXXXXXXX | | |
| | GUUUG | | mC*mU*mA*mG*mU*mU*mU*mG | | XXXX | | |
| WV- | CAUCAAGGAA | 254 | mC*mA*mU*mC*mA*mA*mG*mG*m | 1006 | XXXXXXXXXX | 25-mer 2′-OMethyl | DMD |
| 2224 | GAUGGCAUUU | | A*mA*mG*mA*mU*mG*mG*mC*mA* | | XXXXXXXXXX | | |
| | CUAGU | | mU*mU*mU*mC*mU*mA*mG*mU | | XXXX | | |
| WV- | ACAUCAAGGA | 255 | mA*mC*mA*mU*mC*mA*mA*mG*m | 1007 | XXXXXXXXXX | 25-mer 2′-OMethyl | DMD |
| 2225 | AGAUGGCAUU | | G*mA*mA*mG*mA*mU*mG*mG*mC* | | XXXXXXXXXX | | |
| | UCUAG | | mA*mU*mU*mU*mC*mU*mA*mG | | XXXX | | |
| WV- | AACAUCAAGG | 256 | mA*mA*mC*mA*mU*mC*mA*mA*m | 1008 | XXXXXXXXXX | 25-mer 2′-OMethyl | DMD |
| 2226 | AAGAUGGCAU | | G*mG*mA*mA*mG*mA*mU*mG*mG | | XXXXXXXXXX | | |
| | UUCUA | | *mC*mA*mU*mU*mU*mC*mU*mA | | XXXX | | |
| WV- | CAACAUCAAG | 257 | mC*mA*mA*mC*mA*mU*mC*mA*m | 1009 | XXXXXXXXXX | 25-mer 2′-OMethyl | DMD |
| 2227 | GAAGAUGGCA | | A*mG*mG*mA*mA*mG*mA*mU*mG | | XXXXXXXXXX | | |
| | UUUCU | | *mG*mC*mA*mU*mU*mU*mC*mU | | XXXX | | |
| WV- | CUCCAACAUCA | 258 | mC*mU*mC*mC*mA*mA*mC*mA*m | 1010 | XXXXXXXXXX | 25-mer 2′-OMethyl | DMD |
| 2228 | AGGAAGAUGG | | U*mC*mA*mA*mG*mG*mA*mA*mG* | | XXXXXXXXXX | | |
| | CAUU | | mA*mU*mG*mG*mC*mA*mU*mU | | XXXX | | |
| WV- | ACCUCCAACAU | 259 | mA*mC*mC*mU*mC*mC*mA*mA*m | 1011 | XXXXXXXXXX | 25-mer 2′-OMethyl | DMD |
| 2229 | CAAGGAAGAU | | C*mA*mU*mC*mA*mA*mG*mG*mA* | | XXXXXXXXXX | | |
| | GGCA | | mA*mG*mA*mU*mG*mG*mC*mA | | XXXX | | |
| WV- | GUACCUCCAAC | 260 | mG*mU*mA*mC*mC*mU*mC*mC*m | 1012 | XXXXXXXXXX | 25-mer 2′-OMethyl | DMD |
| 2230 | AUCAAGGAAG | | A*mA*mC*mA*mU*mC*mA*mA*mG* | | XXXXXXXXXX | | |
| | AUGG | | mG*mA*mA*mG*mA*mU*mG*mG | | XXXX | | |
| WV- | AGGUACCUCCA | 261 | mA*mG*mG*mU*mA*mC*mC*mU*m | 1013 | XXXXXXXXXX | 25-mer 2′-OMethyl | DMD |
| 2231 | ACAUCAAGGA | | C*mC*mA*mA*mC*mA*mU*mC*mA* | | XXXXXXXXXX | | |
| | AGAU | | mA*mG*mG*mA*mA*mG*mA*mU | | XXXX | | |
| WV- | AGAGCAGGUA | 262 | mA*mG*mA*mG*mC*mA*mG*mG*m | 1014 | XXXXXXXXXX | 25-mer 2′-OMethyl | DMD |
| 2232 | CCUCCAACAUC | | U*mA*mC*mC*mU*mC*mC*mA*mA* | | XXXXXXXXXX | | |
| | AAGG | | mC*mA*mU*mC*mA*mA*mG*mG | | XXXX | | |
| WV- | CAGAGCAGGU | 263 | mC*mA*mG*mA*mG*mC*mA*mG*m | 1015 | XXXXXXXXXX | 25-mer 2′-OMethyl | DMD |
| 2233 | ACCUCCAACAU | | G*mU*mA*mC*mC*mU*mC*mC*mA* | | XXXXXXXXXX | | |
| | CAAG | | mA*mC*mA*mU*mC*mA*mA*mG | | XXXX | | |
| WV- | CUGCCAGAGCA | 264 | mC*mU*mG*mC*mC*mA*mG*mA*m | 1016 | XXXXXXXXXX | 25-mer 2′-OMethyl | DMD |
| 2234 | GGUACCUCCAA | | G*mC*mA*mG*mG*mU*mA*mC*mC* | | XXXXXXXXXX | | |
| | CAU | | mU*mC*mC*mA*mA*mC*mA*mU | | XXXX | | |
| WV- | UCUGCCAGAGC | 265 | mU*mC*mU*mG*mC*mC*mA*mG*m | 1017 | XXXXXXXXXX | 25-mer 2′-OMethyl | DMD |
| 2235 | AGGUACCUCCA | | A*mG*mC*mA*mG*mG*mU*mA*mC* | | XXXXXXXXXX | | |
| | ACA | | mC*mU*mC*mC*mA*mA*mC*mA | | XXXX | | |
| WV- | AUCUGCCAGA | 266 | mA*mU*mC*mU*mG*mC*mC*mA*m | 1018 | XXXXXXXXXX | 25-mer 2′-OMethyl | DMD |
| 2236 | GCAGGUACCUC | | G*mA*mG*mC*mA*mG*mG*mU*mA* | | XXXXXXXXXX | | |
| | CAAC | | mC*mC*mU*mC*mC*mA*mA*mC | | XXXX | | |
| WV- | AAUCUGCCAG | 267 | mA*mA*mU*mC*mU*mG*mC*mC*m | 1019 | XXXXXXXXXX | 25-mer 2′-OMethyl | DMD |
| 2237 | AGCAGGUACC | | A*mG*mA*mG*mC*mA*mG*mG*mU* | | XXXXXXXXXX | | |
| | UCCAA | | mA*mC*mC*mU*mC*mC*mA*mA | | XXXX | | |
| WV- | AAAUCUGCCA | 268 | mA*mA*mA*mU*mC*mU*mG*mC*m | 1020 | XXXXXXXXXX | 25-mer 2′-OMethyl | DMD |
| 2238 | GAGCAGGUAC | | C*mA*mG*mA*mG*mC*mA*mG*mG* | | XXXXXXXXXX | | |
| | CUCCA | | mU*mA*mC*mC*mU*mC*mC*mA | | XXXX | | |
| WV- | GAAAUCUGCC | 269 | mG*mA*mA*mA*mU*mC*mU*mG*m | 1021 | XXXXXXXXXX | 25-mer 2′-OMethyl | DMD |
| 2239 | AGAGCAGGUA | | C*mC*mA*mG*mA*mG*mC*mA*mG* | | XXXXXXXXXX | | |
| | CCUCC | | mG*mU*mA*mC*mC*mU*mC*mC | | XXXX | | |
| WV- | UGAAAUCUGC | 270 | mU*mG*mA*mA*mA*mU*mC*mU*m | 1022 | XXXXXXXXXX | 25-mer 2′-OMethyl | DMD |
| 2240 | CAGAGCAGGU | | G*mC*mC*mA*mG*mA*mG*mC*mA* | | XXXXXXXXXX | | |
| | ACCUC | | mG*mG*mU*mA*mC*mC*mU*mC | | XXXX | | |
| WV- | UUGAAAUCUG | 271 | mU*mU*mG*mA*mA*mA*mU*mC*m | 1023 | XXXXXXXXXX | 25-mer 2′-OMethyl | DMD |
| 2241 | CCAGAGCAGG | | U*mG*mC*mC*mA*mG*mA*mG*mC* | | XXXXXXXXXX | | |
| | UACCU | | mA*mG*mG*mU*mA*mC*mC*mU | | XXXX | | |
| WV- | CCCGGUUGAA | 272 | mC*mC*mC*mG*mG*mU*mU*mG*m | 1024 | XXXXXXXXXX | 25-mer 2′-OMethyl | DMD |
| 2242 | AUCUGCCAGA | | A*mA*mA*mU*mC*mU*mG*mC*mC* | | XXXXXXXXXX | | |
| | GCAGG | | mA*mG*mA*mG*mC*mA*mG*mG | | XXXX | | |
| WV- | CCAAGCCCGGU | 273 | mC*mC*mA*mA*mG*mC*mC*mC*m | 1025 | XXXXXXXXXX | 25-mer 2′-OMethyl | DMD |
| 2243 | UGAAAUCUGC | | G*mG*mU*mU*mG*mA*mA*mA*mU | | XXXXXXXXXX | | |
| | CAGA | | *mC*mU*mG*mC*mC*mA*mG*mA | | XXXX | | |
| WV- | UCCAAGCCCGG | 274 | mU*mC*mC*mA*mA*mG*mC*mC*m | 1026 | XXXXXXXXXX | 25-mer 2′-OMethyl | DMD |
| 2244 | UUGAAAUCUG | | C*mG*mG*mU*mU*mG*mA*mA*mA* | | XXXXXXXXXX | | |
| | CCAG | | mU*mC*mU*mG*mC*mC*mA*mG | | XXXX | | |
| WV- | GUCCAAGCCCG | 275 | mG*mU*mC*mC*mA*mA*mG*mC*m | 1027 | XXXXXXXXXX | 25-mer 2′-OMethyl | DMD |
| 2245 | GUUGAAAUCU | | C*mC*mG*mG*mU*mU*mG*mA*mA* | | XXXXXXXXXX | | |
| | GCCA | | mA*mU*mC*mU*mG*mC*mC*mA | | XXXX | | |
| WV- | UCUGUCCAAGC | 276 | mU*mC*mU*mG*mU*mC*mC*mA*m | 1028 | XXXXXXXXXX | 25-mer 2′-OMethyl | DMD |
| 2246 | CCGGUUGAAA | | A*mG*mC*mC*mC*mG*mG*mU*mU* | | XXXXXXXXXX | | |
| | UCUG | | mG*mA*mA*mA*mU*mC*mU*mG | | XXXX | | |
| WV- | UUCUGUCCAA | 277 | mU*mU*mC*mU*mG*mU*mC*mC*m | 1029 | XXXXXXXXXX | 25-mer 2′-OMethyl | DMD |
| 2247 | GCCCGGUUGA | | A*mA*mG*mC*mC*mC*mG*mG*mU* | | XXXXXXXXXX | | |
| | AAUCU | | mU*mG*mA*mA*mA*mU*mC*mU | | XXXX | | |
| WV- | GUUCUGUCCA | 278 | mG*mU*mU*mC*mU*mG*mU*mC*m | 1030 | XXXXXXXXXX | 25-mer 2′-OMethyl | DMD |
| 2248 | AGCCCGGUUG | | C*mA*mA*mG*mC*mC*mC*mG*mG* | | XXXXXXXXXX | | |
| | AAAUC | | mU*mU*mG*mA*mA*mA*mU*mC | | XXXX | | |
| WV- | AGUUCUGUCC | 279 | mA*mG*mU*mU*mC*mU*mG*mU*m | 1031 | XXXXXXXXXX | 25-mer 2′-OMethyl | DMD |
| 2249 | AAGCCCGGUU | | C*mC*mA*mA*mG*mC*mC*mC*mG* | | XXXXXXXXXX | | |
| | GAAAU | | mG*mU*mU*mG*mA*mA*mA*mU | | XXXX | | |
| WV- | AAGUUCUGUC | 280 | mA*mA*mG*mU*mU*mC*mU*mG*m | 1032 | XXXXXXXXXX | 25-mer 2′-OMethyl | DMD |
| 2250 | CAAGCCCGGUU | | U*mC*mC*mA*mA*mG*mC*mC*mC* | | XXXXXXXXXX | | |
| | GAAA | | mG*mG*mU*mU*mG*mA*mA*mA | | XXXX | | |
| WV- | UAAGUUCUGU | 281 | mU*mA*mA*mG*mU*mU*mC*mU*m | 1033 | XXXXXXXXXX | 25-mer 2′-OMethyl | DMD |
| 2251 | CCAAGCCCGGU | | G*mU*mC*mC*mA*mA*mG*mC*mC* | | XXXXXXXXXX | | |
| | UGAA | | mC*mG*mG*mU*mU*mG*mA*mA | | XXXX | | |
| WV- | GUAAGUUCUG | 282 | mG*mU*mA*mA*mG*mU*mU*mC*m | 1034 | XXXXXXXXXX | 25-mer 2′-OMethyl | DMD |
| 2252 | UCCAAGCCCGG | | U*mG*mU*mC*mC*mA*mA*mG*mC* | | XXXXXXXXXX | | |
| | UUGA | | mC*mC*mG*mG*mU*mU*mG*mA | | XXXX | | |
| WV- | GGUAAGUUCU | 283 | mG*mG*mU*mA*mA*mG*mU*mU*m | 1035 | XXXXXXXXXX | 25-mer 2′-OMethyl | DMD |
| 2253 | GUCCAAGCCCG | | C*mU*mG*mU*mC*mC*mA*mA*mG* | | XXXXXXXXXX | | |
| | GUUG | | mC*mC*mC*mG*mG*mU*mU*mG | | XXXX | | |
| WV- | CGGUAAGUUC | 284 | mC*mG*mG*mU*mA*mA*mG*mU*m | 1036 | XXXXXXXXXX | 25-mer 2′-OMethyl | DMD |
| 2254 | UGUCCAAGCCC | | U*mC*mU*mG*mU*mC*mC*mA*mA* | | XXXXXXXXXX | | |
| | GGUU | | mG*mC*mC*mC*mG*mG*mU*mU | | XXXX | | |
| WV- | UCGGUAAGUU | 285 | mU*mC*mG*mG*mU*mA*mA*mG*m | 1037 | XXXXXXXXXX | 25-mer 2′-OMethyl | DMD |
| 2255 | CUGUCCAAGCC | | U*mU*mC*mU*mG*mU*mC*mC*mA* | | XXXXXXXXXX | | |
| | CGGU | | mA*mG*mC*mC*mC*mG*mG*mU | | XXXX | | |
| WV- | GUCGGUAAGU | 286 | mG*mU*mC*mG*mG*mU*mA*mA*m | 1038 | XXXXXXXXXX | 25-mer 2′-OMethyl | DMD |
| 2256 | UCUGUCCAAGC | | G*mU*mU*mC*mU*mG*mU*mC*mC* | | XXXXXXXXXX | | |
| | CCGG | | mA*mA*mG*mC*mC*mC*mG*mG | | XXXX | | |
| WV- | AGUCGGUAAG | 287 | mA*mG*mU*mC*mG*mG*mU*mA*m | 1039 | XXXXXXXXXX | 25-mer 2′-OMethyl | DMD |
| 2257 | UUCUGUCCAA | | A*mG*mU*mU*mC*mU*mG*mU*mC* | | XXXXXXXXXX | | |
| | GCCCG | | mC*mA*mA*mG*mC*mC*mC*mG | | XXXX | | |
| WV- | CAGUCGGUAA | 288 | mC*mA*mG*mU*mC*mG*mG*mU*m | 1040 | XXXXXXXXXX | 25-mer 2′-OMethyl | DMD |
| 2258 | GUUCUGUCCA | | A*mA*mG*mU*mU*mC*mU*mG*mU* | | XXXXXXXXXX | | |
| | AGCCC | | mC*mC*mA*mA*mG*mC*mC*mC | | XXXX | | |
| WV- | AAAGCCAGUC | 289 | mA*mA*mA*mG*mC*mC*mA*mG*m | 1041 | XXXXXXXXXX | 25-mer 2′-OMethyl | DMD |
| 2259 | GGUAAGUUCU | | U*mC*mG*mG*mU*mA*mA*mG*mU* | | XXXXXXXXXX | | |
| | GUCCA | | mU*mC*mU*mG*mU*mC*mC*mA | | XXXX | | |
| WV- | GAAAGCCAGU | 290 | mG*mA*mA*mA*mG*mC*mC*mA*m | 1042 | XXXXXXXXXX | 25-mer 2′-OMethyl | DMD |
| 2260 | CGGUAAGUUC | | G*mU*mC*mG*mG*mU*mA*mA*mG* | | XXXXXXXXXX | | |
| | UGUCC | | mU*mU*mC*mU*mG*mU*mC*mC | | XXXX | | |
| WV- | GUCACCCACCA | 291 | mG*mU*mC*mA*mC*mC*mC*mA*m | 1043 | XXXXXXXXXX | 25-mer 2′-OMethyl | DMD |
| 2261 | UCACCCUCUGU | | C*mC*mA*mU*mC*mA*mC*mC*mC* | | XXXXXXXXXX | | |
| | GAU | | mU*mC*mU*mG*mU*mG*mA*mU | | XXXX | | |
| WV- | GGUCACCCACC | 292 | mG*mG*mU*mC*mA*mC*mC*mC*m | 1044 | XXXXXXXXXX | 25-mer 2′-OMethyl | DMD |
| 2262 | AUCACCCUCUG | | A*mC*mC*mA*mU*mC*mA*mC*mC* | | XXXXXXXXXX | | |
| | UGA | | mC*mU*mC*mU*mG*mU*mG*mA | | XXXX | | |
| WV- | AAGGUCACCCA | 293 | mA*mA*mG*mG*mU*mC*mA*mC*m | 1045 | XXXXXXXXXX | 25-mer 2′-OMethyl | DMD |
| 2263 | CCAUCACCCUC | | C*mC*mA*mC*mC*mA*mU*mC*mA* | | XXXXXXXXXX | | |
| | UGU | | mC*mC*mC*mU*mC*mU*mG*mU | | XXXX | | |
| WV- | CAAGGUCACCC | 294 | mC*mA*mA*mG*mG*mU*mC*mA*m | 1046 | XXXXXXXXXX | 25-mer 2′-OMethyl | DMD |
| 2264 | ACCAUCACCCU | | C*mC*mC*mA*mC*mC*mA*mU*mC* | | XXXXXXXXXX | | |
| | CUG | | mA*mC*mC*mC*mU*mC*mU*mG | | XXXX | | |
| WV- | UCAAGGUCACC | 295 | mU*mC*mA*mA*mG*mG*mU*mC*m | 1047 | XXXXXXXXXX | 25-mer 2′-OMethyl | DMD |
| 2265 | CACCAUCACCC | | A*mC*mC*mC*mA*mC*mC*mA*mU* | | XXXXXXXXXX | | |
| | UCU | | mC*mA*mC*mC*mC*mU*mC*mU | | XXXX | | |
| WV- | CUCAAGGUCAC | 296 | mC*mU*mC*mA*mA*mG*mG*mU*m | 1048 | XXXXXXXXXX | 25-mer 2′-OMethyl | DMD |
| 2266 | CCACCAUCACC | | C*mA*mC*mC*mC*mA*mC*mC*mA* | | XXXXXXXXXX | | |
| | CUC | | mU*mC*mA*mC*mC*mC*mU*mC | | XXXX | | |
| WV- | CUUGAUCAAG | 297 | mC*mU*mU*mG*mA*mU*mC*mA*m | 1049 | XXXXXXXXXX | 25-mer 2′-OMethyl | DMD |
| 2267 | CAGAGAAAGC | | A*mG*mC*mA*mG*mA*mG*mA*mA* | | XXXXXXXXXX | | |
| | CAGUC | | mA*mG*mC*mC*mA*mG*mU*mC | | XXXX | | |
| WV- | AUAACUUGAU | 298 | mA*mU*mA*mA*mC*mU*mU*mG*m | 1050 | XXXXXXXXXX | 25-mer 2′-OMethyl | DMD |
| 2268 | CAAGCAGAGA | | A*mU*mC*mA*mA*mG*mC*mA*mG* | | XXXXXXXXXX | | |
| | AAGCC | | mA*mG*mA*mA*mA*mG*mC*mC | | XXXX | | |
| WV- | AGUAACAGUC | 299 | mA*mG*mU*mA*mA*mC*mA*mG*m | 1051 | XXXXXXXXXX | 20-mer 2′-OMethyl | DMD |
| 2273 | UGAGUAGGAG | | U*mC*mU*mG*mA*mG*mU*mA*mG* | | XXXXXXXXX | | |
| | | | mG*mA*mG | | | | |
| WV- | GAGUAACAGU | 300 | mG*mA*mG*mU*mA*mA*mC*mA*m | 1052 | XXXXXXXXXX | 20-mer 2′-OMethyl | DMD |
| 2274 | CUGAGUAGGA | | G*mU*mC*mU*mG*mA*mG*mU*mA* | | XXXXXXXXX | | |
| | | | mG*mG*mA | | | | |
| WV- | AGAGUAACAG | 301 | mA*mG*mA*mG*mU*mA*mA*mC*m | 1053 | XXXXXXXXXX | 20-mer 2′-OMethyl | DMD |
| 2275 | UCUGAGUAGG | | A*mG*mU*mC*mU*mG*mA*mG*mU* | | XXXXXXXXX | | |
| | | | mA*mG*mG | | | | |
| WV- | CAGAGUAACA | 302 | mC*mA*mG*mA*mG*mU*mA*mA*m | 1054 | XXXXXXXXXX | 20-mer 2′-OMethyl | DMD |
| 2276 | GUCUGAGUAG | | C*mA*mG*mU*mC*mU*mG*mA*mG* | | XXXXXXXXX | | |
| | | | mU*mA*mG | | | | |
| WV- | GUCACCAGAG | 303 | mG*mU*mC*mA*mC*mC*mA*mG*m | 1055 | XXXXXXXXXX | 20-mer 2′-OMethyl | DMD |
| 2277 | UAACAGUCUG | | A*mG*mU*mA*mA*mC*mA*mG*mU* | | XXXXXXXXX | | |
| | | | mC*mU*mG | | | | |
| WV- | UGUCACCAGA | 304 | mU*mG*mU*mC*mA*mC*mC*mA*m | 1056 | XXXXXXXXXX | 20-mer 2′-OMethyl | DMD |
| 2278 | GUAACAGUCU | | G*mA*mG*mU*mA*mA*mC*mA*mG* | | XXXXXXXXX | | |
| | | | mU*mC*mU | | | | |
| WV- | GUGUCACCAG | 305 | mG*mU*mG*mU*mC*mA*mC*mC*m | 1057 | XXXXXXXXXX | 20-mer 2′-OMethyl | DMD |
| 2279 | AGUAACAGUC | | A*mG*mA*mG*mU*mA*mA*mC*mA* | | XXXXXXXXX | | |
| | | | mG*mU*mC | | | | |
| WV- | UGUGUCACCA | 306 | mU*mG*mU*mG*mU*mC*mA*mC*m | 1058 | XXXXXXXXXX | 20-mer 2′-OMethyl | DMD |
| 2280 | GAGUAACAGU | | C*mA*mG*mA*mG*mU*mA*mA*mC* | | XXXXXXXXX | | |
| | | | mA*mG*mU | | | | |
| WV- | UUGUGUCACC | 307 | mU*mU*mG*mU*mG*mU*mC*mA*m | 1059 | XXXXXXXXXX | 20-mer 2′-OMethyl | DMD |
| 2281 | AGAGUAACAG | | C*mC*mA*mG*mA*mG*mU*mA*mA* | | XXXXXXXXX | | |
| | | | mC*mA*mG | | | | |
| WV- | GGUUGUGUCA | 308 | mG*mG*mU*mU*mG*mU*mG*mU*m | 1060 | XXXXXXXXXX | 20-mer 2′-OMethyl | DMD |
| 2282 | CCAGAGUAAC | | C*mA*mC*mC*mA*mG*mA*mG*mU* | | XXXXXXXXX | | |
| | | | mA*mA*mC | | | | |
| WV- | AGGUUGUGUC | 309 | mA*mG*mG*mU*mU*mG*mU*mG*m | 1061 | XXXXXXXXXX | 20-mer 2′-OMethyl | DMD |
| 2283 | ACCAGAGUAA | | U*mC*mA*mC*mC*mA*mG*mA*mG* | | XXXXXXXXX | | |
| | | | mU*mA*mA | | | | |
| WV- | CAGGUUGUGU | 310 | mC*mA*mG*mG*mU*mU*mG*mU*m | 1062 | XXXXXXXXXX | 20-mer 2′-OMethyl | DMD |
| 2284 | CACCAGAGUA | | G*mU*mC*mA*mC*mC*mA*mG*mA* | | XXXXXXXXX | | |
| | | | mG*mU*mA | | | | |
| WV- | ACAGGUUGUG | 311 | mA*mC*mA*mG*mG*mU*mU*mG*m | 1063 | XXXXXXXXXX | 20-mer 2′-OMethyl | DMD |
| 2285 | UCACCAGAGU | | U*mG*mU*mC*mA*mC*mC*mA*mG* | | XXXXXXXXX | | |
| | | | mA*mG*mU | | | | |
| WV- | CACAGGUUGU | 312 | mC*mA*mC*mA*mG*mG*mU*mU*m | 1064 | XXXXXXXXXX | 20-mer 2′-OMethyl | DMD |
| 2286 | GUCACCAGAG | | G*mU*mG*mU*mC*mA*mC*mC*mA* | | XXXXXXXXX | | |
| | | | mG*mA*mG | | | | |
| WV- | CCACAGGUUG | 313 | mC*mC*mA*mC*mA*mG*mG*mU*m | 1065 | XXXXXXXXXX | 20-mer 2′-OMethyl | DMD |
| 2287 | UGUCACCAGA | | U*mG*mU*mG*mU*mC*mA*mC*mC* | | XXXXXXXXX | | |
| | | | mA*mG*mA | | | | |
| WV- | ACCACAGGUU | 314 | mA*mC*mC*mA*mC*mA*mG*mG*m | 1066 | XXXXXXXXXX | 20-mer 2′-OMethyl | DMD |
| 2288 | GUGUCACCAG | | U*mU*mG*mU*mG*mU*mC*mA*mC* | | XXXXXXXXX | | |
| | | | mC*mA*mG | | | | |
| WV- | AACCACAGGU | 315 | mA*mA*mC*mC*mA*mC*mA*mG*m | 1067 | XXXXXXXXXX | 20-mer 2′-OMethyl | DMD |
| 2289 | UGUGUCACCA | | G*mU*mU*mG*mU*mG*mU*mC*mA* | | XXXXXXXXX | | |
| | | | mC*mC*mA | | | | |
| WV- | UAACCACAGG | 316 | mU*mA*mA*mC*mC*mA*mC*mA*m | 1068 | XXXXXXXXXX | 20-mer 2′-OMethyl | DMD |
| 2290 | UUGUGUCACC | | G*mG*mU*mU*mG*mU*mG*mU*mC* | | XXXXXXXXX | | |
| | | | mA*mC*mC | | | | |
| WV- | GUAACCACAG | 317 | mG*mU*mA*mA*mC*mC*mA*mC*m | 1069 | XXXXXXXXXX | 20-mer 2′-OMethyl | DMD |
| 2291 | GUUGUGUCAC | | A*mG*mG*mU*mU*mG*mU*mG*mU | | XXXXXXXXX | | |
| | | | *mC*mA*mC | | | | |
| WV- | AGUAACCACA | 318 | mA*mG*mU*mA*mA*mC*mC*mA*m | 1070 | XXXXXXXXXX | 20-mer 2′-OMethyl | DMD |
| 2292 | GGUUGUGUCA | | C*mA*mG*mG*mU*mU*mG*mU*mG* | | XXXXXXXXX | | |
| | | | mU*mC*mA | | | | |
| WV- | CUUAGUAACC | 319 | mC*mU*mU*mA*mG*mU*mA*mA*m | 1071 | XXXXXXXXXX | 20-mer 2′-OMethyl | DMD |
| 2293 | ACAGGUUGUG | | C*mC*mA*mC*mA*mG*mG*mU*mU* | | XXXXXXXXX | | |
| | | | mG*mU*mG | | | | |
| WV- | CCUUAGUAACC | 320 | mC*mC*mU*mU*mA*mG*mU*mA*m | 1072 | XXXXXXXXXX | 20-mer 2′-OMethyl | DMD |
| 2294 | ACAGGUUGU | | A*mC*mC*mA*mC*mA*mG*mG*mU* | | XXXXXXXXX | | |
| | | | mU*mG*mU | | | | |
| WV- | UCCUUAGUAA | 321 | mU*mC*mC*mU*mU*mA*mG*mU*m | 1073 | XXXXXXXXXX | 20-mer 2′-OMethyl | DMD |
| 2295 | CCACAGGUUG | | A*mA*mC*mC*mA*mC*mA*mG*mG* | | XXXXXXXXX | | |
| | | | mU*mU*mG | | | | |
| WV- | UUCCUUAGUA | 322 | mU*mU*mC*mC*mU*mU*mA*mG*m | 1074 | XXXXXXXXXX | 20-mer 2′-OMethyl | DMD |
| 2296 | ACCACAGGUU | | U*mA*mA*mC*mC*mA*mC*mA*mG* | | XXXXXXXXX | | |
| | | | mG*mU*mU | | | | |
| WV- | UUUCCUUAGU | 323 | mU*mU*mU*mC*mC*mU*mU*mA*m | 1075 | XXXXXXXXXX | 20-mer 2′-OMethyl | DMD |
| 2297 | AACCACAGGU | | G*mU*mA*mA*mC*mC*mA*mC*mA* | | XXXXXXXXX | | |
| | | | mG*mG*mU | | | | |
| WV- | GUUUCCUUAG | 324 | mG*mU*mU*mU*mC*mC*mU*mU*m | 1076 | XXXXXXXXXX | 20-mer 2′-OMethyl | DMD |
| 2298 | UAACCACAGG | | A*mG*mU*mA*mA*mC*mC*mA*mC* | | XXXXXXXXX | | |
| | | | mA*mG*mG | | | | |
| WV- | AGUUUCCUUA | 325 | mA*mG*mU*mU*mU*mC*mC*mU*m | 1077 | XXXXXXXXXX | 20-mer 2′-OMethyl | DMD |
| 2299 | GUAACCACAG | | U*mA*mG*mU*mA*mA*mC*mC*mA* | | XXXXXXXXX | | |
| | | | mC*mA*mG | | | | |
| WV- | GCAGUUUCCU | 326 | mG*mC*mA*mG*mU*mU*mU*mC*m | 1078 | XXXXXXXXXX | 20-mer 2′-OMethyl | DMD |
| 2300 | UAGUAACCAC | | C*mU*mU*mA*mG*mU*mA*mA*mC* | | XXXXXXXXX | | |
| | | | mC*mA*mC | | | | |
| WV- | GGCAGUUUCC | 327 | mG*mG*mC*mA*mG*mU*mU*mU*m | 1079 | XXXXXXXXXX | 20-mer 2′-OMethyl | DMD |
| 2301 | UUAGUAACCA | | C*mC*mU*mU*mA*mG*mU*mA*mA* | | XXXXXXXXX | | |
| | | | mC*mC*mA | | | | |
| WV- | UGGCAGUUUC | 328 | mU*mG*mG*mC*mA*mG*mU*mU*m | 1080 | XXXXXXXXXX | 20-mer 2′-OMethyl | DMD |
| 2302 | CUUAGUAACC | | U*mC*mC*mU*mU*mA*mG*mU*mA* | | XXXXXXXXX | | |
| | | | mA*mC*mC | | | | |
| WV- | AUGGCAGUUU | 329 | mA*mU*mG*mG*mC*mA*mG*mU*m | 1081 | XXXXXXXXXX | 20-mer 2′-OMethyl | DMD |
| 2303 | CCUUAGUAAC | | U*mU*mC*mC*mU*mU*mA*mG*mU* | | XXXXXXXXX | | |
| | | | mA*mA*mC | | | | |
| WV- | GAUGGCAGUU | 330 | mG*mA*mU*mG*mG*mC*mA*mG*m | 1082 | XXXXXXXXXX | 20-mer 2′-OMethyl | DMD |
| 2304 | UCCUUAGUAA | | U*mU*mU*mC*mC*mU*mU*mA*mG* | | XXXXXXXXX | | |
| | | | mU*mA*mA | | | | |
| WV- | AGAUGGCAGU | 331 | mA*mG*mA*mU*mG*mG*mC*mA*m | 1083 | XXXXXXXXXX | 20-mer 2′-OMethyl | DMD |
| 2305 | UUCCUUAGUA | | G*mU*mU*mU*mC*mC*mU*mU*mA* | | XXXXXXXXX | | |
| | | | mG*mU*mA | | | | |
| WV- | GGAGAUGGCA | 332 | mG*mG*mA*mG*mA*mU*mG*mG*m | 1084 | XXXXXXXXXX | 20-mer 2′-OMethyl | DMD |
| 2306 | GUUUCCUUAG | | C*mA*mG*mU*mU*mU*mC*mC*mU* | | XXXXXXXXX | | |
| | | | mU*mA*mG | | | | |
| WV- | UGGAGAUGGC | 333 | mU*mG*mG*mA*mG*mA*mU*mG*m | 1085 | XXXXXXXXXX | 20-mer 2′-OMethyl | DMD |
| 2307 | AGUUUCCUUA | | G*mC*mA*mG*mU*mU*mU*mC*mC* | | XXXXXXXXX | | |
| | | | mU*mU*mA | | | | |
| WV- | UUGGAGAUGG | 334 | mU*mU*mG*mG*mA*mG*mA*mU*m | 1086 | XXXXXXXXXX | 20-mer 2′-OMethyl | DMD |
| 2308 | CAGUUUCCUU | | G*mG*mC*mA*mG*mU*mU*mU*mC* | | XXXXXXXXX | | |
| | | | mC*mU*mU | | | | |
| WV- | UUUGGAGAUG | 335 | mU*mU*mU*mG*mG*mA*mG*mA*m | 1087 | XXXXXXXXXX | 20-mer 2′-OMethyl | DMD |
| 2309 | GCAGUUUCCU | | U*mG*mG*mC*mA*mG*mU*mU*mU* | | XXXXXXXXX | | |
| | | | mC*mC*mU | | | | |
| WV- | GUUUGGAGAU | 336 | mG*mU*mU*mU*mG*mG*mA*mG*m | 1088 | XXXXXXXXXX | 20-mer 2′-OMethyl | DMD |
| 2310 | GGCAGUUUCC | | A*mU*mG*mG*mC*mA*mG*mU*mU* | | XXXXXXXXX | | |
| | | | mU*mC*mC | | | | |
| WV- | CUAGUUUGGA | 337 | mC*mU*mA*mG*mU*mU*mU*mG*m | 1089 | XXXXXXXXXX | 20-mer 2′-OMethyl | DMD |
| 2311 | GAUGGCAGUU | | G*mA*mG*mA*mU*mG*mG*mC*mA* | | XXXXXXXXX | | |
| | | | mG*mU*mU | | | | |
| WV- | UCUAGUUUGG | 338 | mU*mC*mU*mA*mG*mU*mU*mU*m | 1090 | XXXXXXXXXX | 20-mer 2′-OMethyl | DMD |
| 2312 | AGAUGGCAGU | | G*mG*mA*mG*mA*mU*mG*mG*mC* | | XXXXXXXXX | | |
| | | | mA*mG*mU | | | | |
| WV- | AUUUCUAGUU | 339 | mA*mU*mU*mU*mC*mU*mA*mG*m | 1091 | XXXXXXXXXX | 20-mer 2′-OMethyl | DMD |
| 2313 | UGGAGAUGGC | | U*mU*mU*mG*mG*mA*mG*mA*mU | | XXXXXXXXX | | |
| | | | *mG*mG*mC | | | | |
| WV- | UGGCAUUUCU | 340 | mU*mG*mG*mC*mA*mU*mU*mU*m | 1092 | XXXXXXXXXX | 20-mer 2′-OMethyl | DMD |
| 2314 | AGUUUGGAGA | | C*mU*mA*mG*mU*mU*mU*mG*mG* | | XXXXXXXXX | | |
| | | | mA*mG*mA | | | | |
| WV- | GAUGGCAUUU | 341 | mG*mA*mU*mG*mG*mC*mA*mU*m | 1093 | XXXXXXXXXX | 20-mer 2′-OMethyl | DMD |
| 2315 | CUAGUUUGGA | | U*mU*mC*mU*mA*mG*mU*mU*mU* | | XXXXXXXXX | | |
| | | | mG*mG*mA | | | | |
| WV- | AGAUGGCAUU | 342 | mA*mG*mA*mU*mG*mG*mC*mA*m | 1094 | XXXXXXXXXX | 20-mer 2′-OMethyl | DMD |
| 2316 | UCUAGUUUGG | | U*mU*mU*mC*mU*mA*mG*mU*mU* | | XXXXXXXXX | | |
| | | | mU*mG*mG | | | | |
| WV- | AAGAUGGCAU | 343 | mA*mA*mG*mA*mU*mG*mG*mC*m | 1095 | XXXXXXXXXX | 20-mer 2′-OMethyl | DMD |
| 2317 | UUCUAGUUUG | | A*mU*mU*mU*mC*mU*mA*mG*mU* | | XXXXXXXXX | | |
| | | | mU*mU*mG | | | | |
| WV- | AGGAAGAUGG | 344 | mA*mG*mG*mA*mA*mG*mA*mU*m | 1096 | XXXXXXXXXX | 20-mer 2′-OMethyl | DMD |
| 2318 | CAUUUCUAGU | | G*mG*mC*mA*mU*mU*mU*mC*mU* | | XXXXXXXXX | | |
| | | | mA*mG*mU | | | | |
| WV- | AAGGAAGAUG | 345 | mA*mA*mG*mG*mA*mA*mG*mA*m | 1097 | XXXXXXXXXX | 20-mer 2′-OMethyl | DMD |
| 2319 | GCAUUUCUAG | | U*mG*mG*mC*mA*mU*mU*mU*mC* | | XXXXXXXXX | | |
| | | | mU*mA*mG | | | | |
| WV- | CAAGGAAGAU | 346 | mC*mA*mA*mG*mG*mA*mA*mG*m | 1098 | XXXXXXXXXX | 20-mer 2′-OMethyl | DMD |
| 2320 | GGCAUUUCUA | | A*mU*mG*mG*mC*mA*mU*mU*mU* | | XXXXXXXXX | | |
| | | | mC*mU*mA | | | | |
| WV- | UCAAGGAAGA | 347 | mU*mC*mA*mA*mG*mG*mA*mA*m | 1099 | XXXXXXXXXX | 20-mer 2′-OMethyl | DMD |
| 2321 | UGGCAUUUCU | | G*mA*mU*mG*mG*mC*mA*mU*mU* | | XXXXXXXXX | | |
| | | | mU*mC*mU | | | | |
| WV- | ACAUCAAGGA | 348 | mA*mC*mA*mU*mC*mA*mA*mG*m | 1100 | XXXXXXXXXX | 20-mer 2′-OMethyl | DMD |
| 2322 | AGAUGGCAUU | | G*mA*mA*mG*mA*mU*mG*mG*mC* | | XXXXXXXXX | | |
| | | | mA*mU*mU | | | | |
| WV- | CAACAUCAAG | 349 | mC*mA*mA*mC*mA*mU*mC*mA*m | 1101 | XXXXXXXXXX | 20-mer 2′-OMethyl | DMD |
| 2323 | GAAGAUGGCA | | A*mG*mG*mA*mA*mG*mA*mU*mG | | XXXXXXXXX | | |
| | | | *mG*mC*mA | | | | |
| WV- | UCCAACAUCAA | 350 | mU*mC*mC*mA*mA*mC*mA*mU*m | 1102 | XXXXXXXXXX | 20-mer 2′-OMethyl | DMD |
| 2324 | GGAAGAUGG | | C*mA*mA*mG*mG*mA*mA*mG*mA* | | XXXXXXXXX | | |
| | | | mU*mG*mG | | | | |
| WV- | CCUCCAACAUC | 351 | mC*mC*mU*mC*mC*mA*mA*mC*m | 1103 | XXXXXXXXXX | 20-mer 2′-OMethyl | DMD |
| 2325 | AAGGAAGAU | | A*mU*mC*mA*mA*mG*mG*mA*mA* | | XXXXXXXXX | | |
| | | | mG*mA*mU | | | | |
| WV- | AGGUACCUCCA | 352 | mA*mG*mG*mU*mA*mC*mC*mU*m | 1104 | XXXXXXXXXX | 20-mer 2′-OMethyl | DMD |
| 2326 | ACAUCAAGG | | C*mC*mA*mA*mC*mA*mU*mC*mA* | | XXXXXXXXX | | |
| | | | mA*mG*mG | | | | |
| WV- | CAGGUACCUCC | 353 | mC*mA*mG*mG*mU*mA*mC*mC*m | 1105 | XXXXXXXXXX | 20-mer 2′-OMethyl | DMD |
| 2327 | AACAUCAAG | | U*mC*mC*mA*mA*mC*mA*mU*mC* | | XXXXXXXXX | | |
| | | | mA*mA*mG | | | | |
| WV- | AGAGCAGGUA | 354 | mA*mG*mA*mG*mC*mA*mG*mG*m | 1106 | XXXXXXXXXX | 20-mer 2′-OMethyl | DMD |
| 2328 | CCUCCAACAU | | U*mA*mC*mC*mU*mC*mC*mA*mA* | | XXXXXXXXX | | |
| | | | mC*mA*mU | | | | |
| WV- | CAGAGCAGGU | 355 | mC*mA*mG*mA*mG*mC*mA*mG*m | 1107 | XXXXXXXXXX | 20-mer 2′-OMethyl | DMD |
| 2329 | ACCUCCAACA | | G*mU*mA*mC*mC*mU*mC*mC*mA* | | XXXXXXXXX | | |
| | | | mA*mC*mA | | | | |
| WV- | CCAGAGCAGG | 356 | mC*mC*mA*mG*mA*mG*mC*mA*m | 1108 | XXXXXXXXXX | 20-mer 2′-OMethyl | DMD |
| 2330 | UACCUCCAAC | | G*mG*mU*mA*mC*mC*mU*mC*mC* | | XXXXXXXXX | | |
| | | | mA*mA*mC | | | | |
| WV- | GCCAGAGCAG | 357 | mG*mC*mC*mA*mG*mA*mG*mC*m | 1109 | XXXXXXXXXX | 20-mer 2′-OMethyl | DMD |
| 2331 | GUACCUCCAA | | A*mG*mG*mU*mA*mC*mC*mU*mC* | | XXXXXXXXX | | |
| | | | mC*mA*mA | | | | |
| WV- | UGCCAGAGCA | 358 | mU*mG*mC*mC*mA*mG*mA*mG*m | 1110 | XXXXXXXXXX | 20-mer 2′-OMethyl | DMD |
| 2332 | GGUACCUCCA | | C*mA*mG*mG*mU*mA*mC*mC*mU* | | XXXXXXXXX | | |
| | | | mC*mC*mA | | | | |
| WV- | CUGCCAGAGCA | 359 | mC*mU*mG*mC*mC*mA*mG*mA*m | 1111 | XXXXXXXXXX | 20-mer 2′-OMethyl | DMD |
| 2333 | GGUACCUCC | | G*mC*mA*mG*mG*mU*mA*mC*mC* | | XXXXXXXXX | | |
| | | | mU*mC*mC | | | | |
| WV- | UCUGCCAGAGC | 360 | mU*mC*mU*mG*mC*mC*mA*mG*m | 1112 | XXXXXXXXXX | 20-mer 2′-OMethyl | DMD |
| 2334 | AGGUACCUC | | A*mG*mC*mA*mG*mG*mU*mA*mC* | | XXXXXXXXX | | |
| | | | mC*mU*mC | | | | |
| WV- | AUCUGCCAGA | 361 | mA*mU*mC*mU*mG*mC*mC*mA*m | 1113 | XXXXXXXXXX | 20-mer 2′-OMethyl | DMD |
| 2335 | GCAGGUACCU | | G*mA*mG*mC*mA*mG*mG*mU*mA* | | XXXXXXXXX | | |
| | | | mC*mC*mU | | | | |
| WV- | UUGAAAUCUG | 362 | mU*mU*mG*mA*mA*mA*mU*mC*m | 1114 | XXXXXXXXXX | 20-mer 2′-OMethyl | DMD |
| 2336 | CCAGAGCAGG | | U*mG*mC*mC*mA*mG*mA*mG*mC* | | XXXXXXXXX | | |
| | | | mA*mG*mG | | | | |
| WV- | CCCGGUUGAA | 363 | mC*mC*mC*mG*mG*mU*mU*mG*m | 1115 | XXXXXXXXXX | 20-mer 2′-OMethyl | DMD |
| 2337 | AUCUGCCAGA | | A*mA*mA*mU*mC*mU*mG*mC*mC* | | XXXXXXXXX | | |
| | | | mA*mG*mA | | | | |
| WV- | GCCCGGUUGA | 364 | mG*mC*mC*mC*mG*mG*mU*mU*m | 1116 | XXXXXXXXXX | 20-mer 2′-OMethyl | DMD |
| 2338 | AAUCUGCCAG | | G*mA*mA*mA*mU*mC*mU*mG*mC* | | XXXXXXXXX | | |
| | | | mC*mA*mG | | | | |
| WV- | AGCCCGGUUG | 365 | mA*mG*mC*mC*mC*mG*mG*mU*m | 1117 | XXXXXXXXXX | 20-mer 2′-OMethyl | DMD |
| 2339 | AAAUCUGCCA | | U*mG*mA*mA*mA*mU*mC*mU*mG* | | XXXXXXXXX | | |
| | | | mC*mC*mA | | | | |
| WV- | CCAAGCCCGGU | 366 | mC*mC*mA*mA*mG*mC*mC*mC*m | 1118 | XXXXXXXXXX | 20-mer 2′-OMethyl | DMD |
| 2340 | UGAAAUCUG | | G*mG*mU*mU*mG*mA*mA*mA*mU | | XXXXXXXXX | | |
| | | | *mC*mU*mG | | | | |
| WV- | UCCAAGCCCGG | 367 | mU*mC*mC*mA*mA*mG*mC*mC*m | 1119 | XXXXXXXXXX | 20-mer 2′-OMethyl | DMD |
| 2341 | UUGAAAUCU | | C*mG*mG*mU*mU*mG*mA*mA*mA* | | XXXXXXXXX | | |
| | | | mU*mC*mU | | | | |
| WV- | GUCCAAGCCCG | 368 | mG*mU*mC*mC*mA*mA*mG*mC*m | 1120 | XXXXXXXXXX | 20-mer 2′-OMethyl | DMD |
| 2342 | GUUGAAAUC | | C*mC*mG*mG*mU*mU*mG*mA*mA* | | XXXXXXXXX | | |
| | | | mA*mU*mC | | | | |
| WV- | UGUCCAAGCCC | 369 | mU*mG*mU*mC*mC*mA*mA*mG*m | 1121 | XXXXXXXXXX | 20-mer 2′-OMethyl | DMD |
| 2343 | GGUUGAAAU | | C*mC*mC*mG*mG*mU*mU*mG*mA* | | XXXXXXXXX | | |
| | | | mA*mA*mU | | | | |
| WV- | CUGUCCAAGCC | 370 | mC*mU*mG*mU*mC*mC*mA*mA*m | 1122 | XXXXXXXXXX | 20-mer 2′-OMethyl | DMD |
| 2344 | CGGUUGAAA | | G*mC*mC*mC*mG*mG*mU*mU*mG* | | XXXXXXXXX | | |
| | | | mA*mA*mA | | | | |
| WV- | UCUGUCCAAGC | 371 | mU*mC*mU*mG*mU*mC*mC*mA*m | 1123 | XXXXXXXXXX | 20-mer 2′-OMethyl | DMD |
| 2345 | CCGGUUGAA | | A*mG*mC*mC*mC*mG*mG*mU*mU* | | XXXXXXXXX | | |
| | | | mG*mA*mA | | | | |
| WV- | UUCUGUCCAA | 372 | mU*mU*mC*mU*mG*mU*mC*mC*m | 1124 | XXXXXXXXXX | 20-mer 2′-OMethyl | DMD |
| 2346 | GCCCGGUUGA | | A*mA*mG*mC*mC*mC*mG*mG*mU* | | XXXXXXXXX | | |
| | | | mU*mG*mA | | | | |
| WV- | GUUCUGUCCA | 373 | mG*mU*mU*mC*mU*mG*mU*mC*m | 1125 | XXXXXXXXXX | 20-mer 2′-OMethyl | DMD |
| 2347 | AGCCCGGUUG | | C*mA*mA*mG*mC*mC*mC*mG*mG* | | XXXXXXXXX | | |
| | | | mU*mU*mG | | | | |
| WV- | AGUUCUGUCC | 374 | mA*mG*mU*mU*mC*mU*mG*mU*m | 1126 | XXXXXXXXXX | 20-mer 2′-OMethyl | DMD |
| 2348 | AAGCCCGGUU | | C*mC*mA*mA*mG*mC*mC*mC*mG* | | XXXXXXXXX | | |
| | | | mG*mU*mU | | | | |
| WV- | AAGUUCUGUC | 375 | mA*mA*mG*mU*mU*mC*mU*mG*m | 1127 | XXXXXXXXXX | 20-mer 2′-OMethyl | DMD |
| 2349 | CAAGCCCGGU | | U*mC*mC*mA*mA*mG*mC*mC*mC* | | XXXXXXXXX | | |
| | | | mG*mG*mU | | | | |
| WV- | UAAGUUCUGU | 376 | mU*mA*mA*mG*mU*mU*mC*mU*m | 1128 | XXXXXXXXXX | 20-mer 2′-OMethyl | DMD |
| 2350 | CCAAGCCCGG | | G*mU*mC*mC*mA*mA*mG*mC*mC* | | XXXXXXXXX | | |
| | | | mC*mG*mG | | | | |
| WV- | GUAAGUUCUG | 377 | mG*mU*mA*mA*mG*mU*mU*mC*m | 1129 | XXXXXXXXXX | 20-mer 2′-OMethyl | DMD |
| 2351 | UCCAAGCCCG | | U*mG*mU*mC*mC*mA*mA*mG*mC* | | XXXXXXXXX | | |
| | | | mC*mC*mG | | | | |
| WV- | GGUAAGUUCU | 378 | mG*mG*mU*mA*mA*mG*mU*mU*m | 1130 | XXXXXXXXXX | 20-mer 2′-OMethyl | DMD |
| 2352 | GUCCAAGCCC | | C*mU*mG*mU*mC*mC*mA*mA*mG* | | XXXXXXXXX | | |
| | | | mC*mC*mC | | | | |
| WV- | CAGUCGGUAA | 379 | mC*mA*mG*mU*mC*mG*mG*mU*m | 1131 | XXXXXXXXXX | 20-mer 2′-OMethyl | DMD |
| 2353 | GUUCUGUCCA | | A*mA*mG*mU*mU*mC*mU*mG*mU* | | XXXXXXXXX | | |
| | | | mC*mC*mA | | | | |
| WV- | CCAGUCGGUA | 380 | mC*mC*mA*mG*mU*mC*mG*mG*m | 1132 | XXXXXXXXXX | 20-mer 2′-OMethyl | DMD |
| 2354 | AGUUCUGUCC | | U*mA*mA*mG*mU*mU*mC*mU*mG* | | XXXXXXXXX | | |
| | | | mU*mC*mC | | | | |
| WV- | CCACCAUCACC | 381 | mC*mC*mA*mC*mC*mA*mU*mC*m | 1133 | XXXXXXXXXX | 20-mer 2′-OMethyl | DMD |
| 2355 | CUCUGUGAU | | A*mC*mC*mC*mU*mC*mU*mG*mU* | | XXXXXXXXX | | |
| | | | mG*mA*mU | | | | |
| WV- | CCCACCAUCAC | 382 | mC*mC*mC*mA*mC*mC*mA*mU*mC | 1134 | XXXXXXXXXX | 20-mer 2′-OMethyl | DMD |
| 2356 | CCUCUGUGA | | *mA*mC*mC*mC*mU*mC*mU*mG*m | | XXXXXXXXX | | |
| | | | U*mG*mA | | | | |
| WV- | CACCCACCAUC | 383 | mC*mA*mC*mC*mC*mA*mC*mC*mA | 1135 | XXXXXXXXXX | 20-mer 2′-OMethyl | DMD |
| 2357 | ACCCUCUGU | | *mU*mC*mA*mC*mC*mC*mU*mC*m | | XXXXXXXXX | | |
| | | | U*mG*mU | | | | |
| WV- | UCACCCACCAU | 384 | mU*mC*mA*mC*mC*mC*mA*mC*mC | 1136 | XXXXXXXXXX | 20-mer 2′-OMethyl | DMD |
| 2358 | CACCCUCUG | | *mA*mU*mC*mA*mC*mC*mC*mU*m | | XXXXXXXXX | | |
| | | | C*mU*mG | | | | |
| WV- | GUCACCCACCA | 385 | mG*mU*mC*mA*mC*mC*mC*mA*m | 1137 | XXXXXXXXXX | 20-mer 2′-OMethyl | DMD |
| 2359 | UCACCCUCU | | C*mC*mA*mU*mC*mA*mC*mC*mC* | | XXXXXXXXX | | |
| | | | mU*mC*mU | | | | |
| WV- | GGUCACCCACC | 386 | mG*mG*mU*mC*mA*mC*mC*mC*m | 1138 | XXXXXXXXXX | 20-mer 2′-OMethyl | DMD |
| 2360 | AUCACCCUC | | A*mC*mC*mA*mU*mC*mA*mC*mC* | | XXXXXXXXX | | |
| | | | mC*mU*mC | | | | |
| WV- | UCAAGCAGAG | 387 | mU*mC*mA*mA*mG*mC*mA*mG*m | 1139 | XXXXXXXXXX | 20-mer 2′-OMethyl | DMD |
| 2361 | AAAGCCAGUC | | A*mG*mA*mA*mA*mG*mC*mC*mA* | | XXXXXXXXX | | |
| | | | mG*mU*mC | | | | |
| WV- | UUGAUCAAGC | 388 | mU*mU*mG*mA*mU*mC*mA*mA*m | 1140 | XXXXXXXXXX | 20-mer 2′-OMethyl | DMD |
| 2362 | AGAGAAAGCC | | G*mC*mA*mG*mA*mG*mA*mA*mA* | | XXXXXXXXX | | |
| | | | mG*mC*mC | | | | |
| WV- | CAAAGAAGAU | 389 | mC*mA*mA*mA*mG*mA*mA*mG*m | 1141 | XXXXXXXXXX | based on WV-2223 | DMD |
| 2625 | GGCAUUUCUA | | A*mU*mG*mG*mC*mA*mU*mU*mU* | | XXXXXXXXXX | match mouse target | |
| | GUUUG | | mC*mU*mA*mG*mU*mU*mU*mG | | XXXX | sequence | |
| WV- | GCAAAGAAGA | 390 | mG*mC*mA*mA*mA*mG*mA*mA*m | 1142 | XXXXXXXXXX | based on WV-942 match | DMD |
| 2627 | UGGCAUUUCU | | G*mA*mU*mG*mG*mC*mA*mU*mU* | | XXXXXXXXX | mouse target sequence | |
| | | | mU*mC*mU | | | | |
| WV- | GCAAAGAAGA | 391 | fG*fC*fA*fA*fA*fG*mA*mA*mG*mA | 1143 | XXXXXXXXXX | based on WV-1714 | DMD |
| 2628 | UGGCAUUUCU | | *mU*mG*mG*mC*fA*fU*fU*fU*fC*fU | | XXXXXXXXX | match mouse target | |
| | | | | | | sequence | |
| WV- | UCAAGGAAGA | 392 | fU*fC*fA*fA*fG*mG*mA*mA*mG*m | 1144 | XXXXXXXXXX | Exon51: 5F -10OMe-5F | DMD |
| 2095 | UGGCAUUUCU | | A*mU*mG*mG*mC*mA*fU*fU*fU*fC | | XXXXXXXXX | all-PS | Exon51 |
| | | | *fU | | | | |
| WV- | UCAAGGAAGA | 393 | fU*fC*fA*fA*mG*mG*mA*mA*mG*m | 1145 | XXXXXXXXXX | Exon51: 4F-12OMe-4F | DMD |
| 2096 | UGGCAUUUCU | | A*mU*mG*mG*mC*mA*mU*fU*fU*f | | XXXXXXXXX | all-PS | Exon51 |
| | | | C*fU | | | | |
| WV- | UCAAGGAAGA | 394 | fU*fC*fA*mA*mG*mG*mA*mA*mG* | 1146 | XXXXXXXXXX | Exon51: 3F -14OMe-3F | DMD |
| 2097 | UGGCAUUUCU | | mA*mU*mG*mG*mC*mA*mU*mU*fU | | XXXXXXXXX | all-PS | Exon51 |
| | | | *fC*fU | | | | |
| WV- | UCAAGGAAGA | 395 | fU*fC*mA*mA*mG*mG*mA*mA*mG* | 1147 | XXXXXXXXXX | Exon51: 2F -16OMe-2F | DMD |
| 2098 | UGGCAUUUCU | | mA*mU*mG*mG*mC*mA*mU*mU*m | | XXXXXXXXX | all-PS | Exon51 |
| | | | U*fC*fU | | | | |
| WV- | UCAAGGAAGA | 396 | fU*mC*mA*mA*mG*mG*mA*mA*mG | 1148 | XXXXXXXXXX | Exon51: 1F-18OMe-1F | DMD |
| 2099 | UGGCAUUUCU | | *mA*mU*mG*mG*mC*mA*mU*mU* | | XXXXXXXXX | all-PS | Exon51 |
| | | | mU*mC*fU | | | | |
| WV- | UCAAGGAAGA | 397 | fU*fC*fA*fA*fG*fGmA*mA*mG*mA* | 1149 | XXXXXOXXXX | Exon51: 6F-8OMe-6F | DMD |
| 2100 | UGGCAUUUCU | | mU*mG*mG*mCfA*fU*fU*fU*fC*fU | | XXXOXXXXX | 5PS-1PO-7PS-1PO-5PS | Exon51 |
| WV- | UCAAGGAAGA | 398 | fU*fC*fA*fA*fGfGmA*mA*mG*mA*m | 1150 | XXXXOOXXXX | Exon51: 6F-8OMe-6F | DMD |
| 2101 | UGGCAUUUCU | | U*mG*mG*mCfAfU*fU*fU*fC*fU | | XXXOOXXXX | 4PS-2PO-7PS-2PO-4PS | Exon51 |
| WV- | UCAAGGAAGA | 399 | fU*fC*fA*fAfGfGmA*mA*mG*mA*m | 1151 | XXXOOOXXXX | Exon51: 6F-8OMe-6F | DMD |
| 2102 | UGGCAUUUCU | | U*mG*mG*mCfAfUfU*fU*fC*fU | | XXXOOOXXX | 3PS-3PO-7PS-3PO-3PS | Exon51 |
| WV- | UCAAGGAAGA | 400 | fU*fC*fAfAfGfGmA*mA*mG*mA*mU | 1152 | XXOOOOXXXX | Exon51: 6F-8OMe-6F | DMD |
| 2103 | UGGCAUUUCU | | *mG*mG*mCfAfUfUfU*fC*fU | | XXXOOOOXX | 2PS-4PO-7PS-4PO-2PS | Exon51 |
| WV- | UCAAGGAAGA | 401 | fU*fCfAfAfGfGmA*mA*mG*mA*mU* | 1153 | XOOOOOXXXX | Exon51: 6F-8OMe-6F | DMD |
| 2104 | UGGCAUUUCU | | mG*mG*mCfAfUfUfUfC*fU | | XXXOOOOOX | 1PS-5PO-7PS-5PO-1PS | Exon51 |
| WV- | UCAAGGAAGA | 402 | fUfCfAfAfGfGmA*mA*mG*mA*mU*m | 1154 | OOOOOOXXXX | Exon51: 6F-8OMe-6F | DMD |
| 2105 | UGGCAUUUCU | | G*mG*mCfAfUfUfUfCfU | | XXXOOOOOO | 6PO-7PS-6PO | Exon51 |
| WV- | UCAAGGAAGA | 403 | fU*fC*fA*fA*fG*fG*fA*fA*fG*fA*mU | 1155 | XXXXXXXXXX | Exon51: 10F-10OMe | DMD |
| 2106 | UGGCAUUUCU | | *mG*mG*mC*mA*mU*mU*mU*mC*mU | | XXXXXXXXX | all-PS | Exon51 |
| WV- | UCAAGGAAGA | 404 | mU*mC*mA*mA*mG*mG*mA*mA*m | 1156 | XXXXXXXXXX | Exon51: 10OMe-10F | DMD |
| 2107 | UGGCAUUUCU | | G*mA*fU*fG*fG*fC*fA*fU*fU*fU*fC* | | XXXXXXXXX | all-PS | Exon51 |
| | | | fU | | | | |
| WV- | UCAAGGAAGA | 405 | fU*fC*fA*fA*fG*fG*mA*mA*mG*mA | 1157 | XXXXXXXXXX | Exon51: 6F-14OMe all- | DMD |
| 2108 | UGGCAUUUCU | | *mU*mG*mG*mC*mA*mU*mU*mU* | | XXXXXXXXX | PS | Exon51 |
| | | | mC*mU | | | | |
| WV- | UCAAGGAAGA | 406 | mU*mC*mA*mA*mG*mG*mA*mA*m | 1158 | XXXXXXXXXX | Exon51: 14OMe-6F all- | DMD |
| 2109 | UGGCAUUUCU | | G*mA*mU*mG*mG*mC*fA*fU*fU*fU | | XXXXXXXXX | PS | Exon51 |
| | | | *fC*fU | | | | |
| WV-884 | UCAAGGAAGA | 407 | mU*RmC*RmA*RmA*RmG*RmG*Rm | 1159 | RRRRRRRRRRR | All-R; 2′-OMe oligo | Dystrophin |
| | UGGCAUUUCU | | A*RmA*RmG*RmA*RmU*RmG*RmG | | RRRRRRRR | | |
| | | | *RmC*RmA*RmU*RmU*RmU*RmC*R | | | | |
| | | | mU | | | | |
| WV-885 | UCAAGGAAGA | 408 | mU*SmC*RmA*SmA*RmG*SmG*RmA | 1160 | SRSRSRSRSRSR | (SR)9S; 2′-OMe oligo | Dystrophin |
| | UGGCAUUUCU | | *SmA*RmG*SmA*RmU*SmG*RmG*S | | SRSRSRS | | |
| | | | mC*RmA*SmU*RmU*SmU*RmC*SmU | | | | |
| WV-886 | UCAAGGAAGA | 409 | mU*RmC*RmA*RmA*SmG*SmG*SmA | 1161 | RRRSSSSSSSSSS | R3S13R3; 2′-OMe oligo | Dystrophin |
| | UGGCAUUUCU | | *SmA*SmG*SmA*SmU*SmG*SmG*Sm | | SSSRRR | | |
| | | | C*SmA*SmU*SmU*RmU*RmC*RmU | | | | |
| WV-887 | UCAAGGAAGA | 410 | mU*SmC*SmA*SmA*RmG*RmG*RmA | 1162 | SSSRRRRRRRRR | S3R13S3; 2′-OMe oligo | Dystrophin |
| | UGGCAUUUCU | | *RmA*RmG*RmA*RmU*RmG*RmG*R | | RRRRSSS | | |
| | | | mC*RmA*RmU*RmU*SmU*SmC*SmU | | | | |
| WV-888 | UCAAGGAAGA | 411 | mU*RmC*RmA*RmA*RmG*RmG*Sm | 1163 | RRRRRSSRSSRS | R5(SSR)3R5; 2′-OMe | Dystrophin |
| | UGGCAUUUCU | | A*SmA*RmG*SmA*SmU*RmG*SmG* | | SRRRRRR | oligo | |
| | | | SmC*RmA*RmU*RmU*RmU*RmC*R | | | | |
| | | | mU | | | | |
| WV-889 | UCAAGGAAGA | 412 | mU*SmC*SmA*SmA*SmG*SmG*RmA | 1164 | SSSSSRRSRRSR | S5(RRS)3S5; 2′-OMe | Dystrophin |
| | UGGCAUUUCU | | *RmA*SmG*RmA*RmU*SmG*RmG*R | | RSSSSSS | oligo | |
| | | | mC*SmA*SmU*SmU*SmU*SmC*SmU | | | | |
| WV-890 | UCAAGGAAGA | 413 | mU*RmC*RmA*RmA*SmG*SmG*Rm | 1165 | RRRSSRRSRRRS | R3S2R2SR3SR2S2R3; | Dystrophin |
| | UGGCAUUUCU | | A*RmA*SmG*RmA*RmU*RmG*SmG* | | RRSSRRR | 2′-OMe oligo | |
| | | | RmC*RmA*SmU*SmU*RmU*RmC*RmU | | | | |
| WV-891 | UCAAGGAAGA | 414 | mU*SmC*SmA*SmA*RmG*RmG*SmA | 1166 | SSSRRSSRSSSRS | S3R2S2RS3RS2R2S3; | Dystrophin |
| | UGGCAUUUCU | | *SmA*RmG*SmA*SmU*SmG*RmG*S | | SRRSSS | 2′-OMe oligo | |
| | | | mC*SmA*RmU*RmU*SmU*SmC*SmU | | | | |
| WV-892 | UCAAGGAAGA | 415 | mU*SmC*RmA*RmA*RmG*RmG*Rm | 1167 | SRRRRRRRRRR | SR17S; 2′-OMe | Dystrophin |
| | UGGCAUUUCU | | A*RmA*RmG*RmA*RmU*RmG*RmG | | RRRRRRRS | chimeric oligo | |
| | | | *RmC*RmA*RmU*RmU*RmU*RmC*S | | | | |
| | | | mU | | | | |
| WV-893 | UCAAGGAAGA | 416 | mU*RmC*SmA*SmA*SmG*SmG*SmA | 1168 | RSSSSSSSSSSSS | RS17R; 2′-OMe | Dystrophin |
| | UGGCAUUUCU | | *SmA*SmG*SmA*SmU*SmG*SmG*Sm | | SSSSSR | chimeric oligo | |
| | | | C*SmA*SmU*SmU*SmU*SmC*RmU | | | | |
| WV-894 | UCAAGGAAGA | 417 | mU*SmC*RmA*SmA*SmG*RmG*RmA | 1169 | SRSSRRSSRSSR | GC(R) and AU(S) 2′- | Dystrophin |
| | UGGCAUUUCU | | *SmA*SmG*RmA*SmU*SmG*RmG*R | | RRSSSSR | OMe oligo | |
| | | | mC*RmA*SmU*SmU*SmU*SmC*RmU | | | | |
| WV-895 | UCAAGGAAGA | 418 | mU*RmC*SmA*RmA*RmG*SmG*SmA | 1170 | RSRRSSRRSRRS | GC(S) and AU(R) 2′- | Dystrophin |
| | UGGCAUUUCU | | *RmA*RmG*SmA*RmU*RmG*SmG*S | | SSRRRRS | OMe oligo | |
| | | | mC*SmA*RmU*RmU*RmU*RmC*SmU | | | | |
| WV-896 | UCAAGGAAGA | 419 | mU*SmC*SmA*RmA*RmG*RmG*Rm | 1171 | SSRRRRRRRRSR | GA(R) and CU(S) 2′- | Dystrophin |
| | UGGCAUUUCU | | A*RmA*RmG*RmA*RmU*SmG*RmG* | | RSRSSSS | OMe oligo | |
| | | | RmC*SmA*RmU*SmU*SmU*SmC*SmU | | | | |
| WV-897 | UCAAGGAAGA | 420 | mU*RmC*RmA*SmA*SmG*SmG*SmA | 1172 | RRSSSSSSSSRSS | GA(S) and CU(R) 2′- | Dystrophin |
| | UGGCAUUUCU | | *SmA*SmG*SmA*SmU*RmG*SmG*S | | RSRRRR | OMe oligo | |
| | | | mC*RmA*SmU*RmU*RmU*RmC*RmU | | | | |
| WV- | GGCCAAACCUC | 421 | fG*fG*fC*fC*fA*fA*fA*fC*fC*fU*fC*f | 1173 | XXXXXXXXXX | All 2′-F modified | Exon 23 |
| 1678 | GGCUUACCU | | G*fG*fC*fU*fU*fA*fC*fC*fU | | XXXXXXXXX | | |
| WV- | GGCCAAACCUC | 422 | mG*mG*fC*fC*mA*mA*mA*fC*fC*fU | 1174 | XXXXXXXXXX | 2′-F pyrimidines; 2′- | Exon 23 |
| 1679 | GGCUUACCU | | *fC*mG*mG*fC*fU*fU*mA*fC*fC*fU | | XXXXXXXXX | OMe purines | |
| WV- | GGCCAAACCUC | 423 | fG*fG*mC*mC*fA*fA*fA*mC*mC*mU | 1175 | XXXXXXXXXX | 2′-F purines; 2′-OMe | Exon 23 |
| 1680 | GGCUUACCU | | *mC*fG*fG*mC*mU*mU*fA*mC*mC* | | XXXXXXXXX | pyrimidines | |
| | | | mU | | | | |
| WV- | GGCCAAACCUC | 424 | mG*fG*mC*fC*mA*fA*mA*fC*mC*fU | 1176 | XXXXXXXXXX | Alternate 2′-OMe/2′F | Exon 23 |
| 1681 | GGCUUACCU | | *mC*fG*mG*fC*mU*fU*mA*fC*mC*fU | | XXXXXXXXX | | |
| WV- | GGCCAAACCUC | 425 | mG*mG*mC*mC*mA*mA*fA*fC*fC*f | 1177 | XXXXXXXXXX | 2′-OMe/2′-F/2′-OMe | Exon 23 |
| 1682 | GGCUUACCU | | U*fC*fG*fG*fC*mU*mU*mA*mC*mC | | XXXXXXXXX | gapmer | |
| | | | *mU | | | | |
| WV- | GGCCAAACCUC | 426 | fG*fG*fC*fC*fA*fA*mA*mC*mC*mU* | 1178 | XXXXXXXXXX | 2′-F/2′-OMe/2′-F gapmer | Exon 23 |
| 1683 | GGCUUACCU | | mC*mG*mG*mC*fU*fU*fA*fC*fC*fU | | XXXXXXXXX | | |
| WV- | GGCCAAACCUC | 427 | fG*fG*fC*fC*mA*mA*mA*fC*fC*mU* | 1179 | XXXXXXXXXX | 2′-F (C; G); 2′-OMe (U; | Exon 23 |
| 1684 | GGCUUACCU | | fC*fG*fG*fC*mU*mU*mA*fC*fC*mU | | XXXXXXXXX | A) | |
| WV- | GGCCAAACCUC | 428 | mG*mG*mC*mC*fA*fA*fA*mC*mC*f | 1180 | XXXXXXXXXX | 2′-F (U; A); 2′-OMe (C; | Exon 23 |
| 1685 | GGCUUACCU | | U*mC*mG*mG*mC*fU*fU*fA*mC*mC | | XXXXXXXXX | G) | |
| | | | *fU | | | | |
| WV- | UCAAGGAAGA | 429 | fU*fC*fA*fA*fG*fG*fA*fA*fG*fA*fU* | 1181 | XXXXXXXXXX | | Exon 51 |
| 1709 | UGGCAUUUCU | | fG*fG*fC*fA*fU*fU*fU*fC*fU | | XXXXXXXXX | | |
| WV- | UCAAGGAAGA | 430 | fU*fC*mA*mA*mG*mG*mA*mA*mG* | 1182 | XXXXXXXXXX | | Exon 51 |
| 1710 | UGGCAUUUCU | | mA*fU*mG*mG*fC*mA*fU*fU*fU*fC | | XXXXXXXXX | | |
| | | | *fu | | | | |
| WV- | UCAAGGAAGA | 431 | mU*mC*fA*fA*fG*fG*fA*fA*fG*fA*m | 1183 | XXXXXXXXXX | | Exon 51 |
| 1711 | UGGCAUUUCU | | U*fG*fG*mC*fA*mU*mU*mU*mC*mU | | XXXXXXXXX | | |
| WV- | UCAAGGAAGA | 432 | mU*fC*mA*fA*mG*fG*mA*fA*mG*f | 1184 | XXXXXXXXXX | | Exon 51 |
| 1712 | UGGCAUUUCU | | A*mU*fG*mG*fC*mA*fU*mU*fU*mC | | XXXXXXXXX | | |
| | | | *fu | | | | |
| WV- | UCAAGGAAGA | 433 | mU*mC*mA*mA*mG*mG*fA*fA*fG*f | 1185 | XXXXXXXXXX | | Exon 51 |
| 1713 | UGGCAUUUCU | | A*fU*fG*fG*fC*mA*mU*mU*mU*mC | | XXXXXXXXX | | |
| | | | *mU | | | | |
| WV- | UCAAGGAAGA | 434 | fU*fC*fA*fA*fG*fG*mA*mA*mG*mA | 1186 | XXXXXXXXXX | | Exon 51 |
| 1714 | UGGCAUUUCU | | *mU*mG*mG*mC*fA*fU*fUqU*fC*fU | | XXXXXXXXX | | |
| WV- | UCAAGGAAGA | 435 | mU*fC*mA*mA*fG*fG*mA*mA*fG*m | 1187 | XXXXXXXXXX | | Exon 51 |
| 1715 | UGGCAUUUCU | | A*mU*fG*fG*fC*mA*mU*mU*mU*fC | | XXXXXXXXX | | |
| | | | *mU | | | | |
| WV- | UCAAGGAAGA | 436 | fU*mC*fA*fA*mG*mG*fA*fA*mG*fA | 1188 | XXXXXXXXXX | | Exon 51 |
| 1716 | UGGCAUUUCU | | *fU*mG*mG*mC*fA*fU*fU*fU*mC*fU | | XXXXXXXXX | | |
| WV- | GGCCAAACCTC | 437 | G*G*C*C*A*A*A*C*C*T*C*G*G*C* | 1189 | XXXXXXXXXX | Stereorandom DNA | Exon23 |
| 1093 | GGCTTACCT | | T*T*A*C*C*T | | XXXXXXXXX | version of Exon23 full | |
| | | | | | | PS: Analog of WV943 | |
| WV- | GGCCAAACCUC | 438 | mGmGmCmCmAmAmAmCmCmUmCm | 1190 | OOOOOOOOOO | Full PO version of | Exon23 |
| 1094 | GGCUUACCU | | GmGmCmUmUmAmCmCmU | | OOOOOOOOO | WV943 | |
| WV- | GGCCAAACCTC | 439 | G*RG*RC*RC*RA*RA*RA*RC*RC*R | 1191 | RRRRRRRRRRR | Full Rp DNA version of | Exon23 |
| 1095 | GGCTTACCT | | T*RC*RG*RG*RC*RT*RT*RA*RC*RC | | RRRRRRRR | Exon23: Analog of | |
| | | | *RT | | | WV943 | |
| WV- | GGCCAAACCTC | 440 | G*SG*SC*SC*SA*SA*SA*SC*SC*ST* | 1192 | SSSSSSSSSSSSSS | Full Sp DNA version of | Exon23 |
| 1096 | GGCTTACCT | | SC*SG*SG*SC*ST*ST*SA*SC*SC*ST | | SSSSS | Exon23: Analog of | |
| | | | | | | WV943 | |
| WV- | GGCCAAACCUC | 441 | G*SG*SC*SC*SA*SmAmAmCmCmUm | 1193 | SSSSSOOOOOO | Stereopure DNA/2′OMe | Exon23 |
| 1097 | GGCTTACCT | | CmGmGmC T*S T*SA*SC*SC*ST | | OOOSSSSS | chimeric version of | |
| | | | | | | Exon23: Analog of 943 | |
| WV- | GGCCAAACCTC | 442 | mGmGmCmCA*SA*SA*SmCC*ST*SC | 1194 | OOOOSSSOSSSS | Stereopure DNA/2′OMe | Exon23 |
| 1098 | GGCTTACCU | | *SG*SmGC*ST*ST*SmAmCmCmU | | OSSSOOO | chimeric version of | |
| | | | | | | Exon23: Analog of 943 | |
| WV- | GGCCAAACCUC | 443 | G*SmGC*SmCA*SmAA*SmCC*SmUC | 1195 | SOSOSOSOSOSO | Stereopure DNA/2′OMe | Exon23 |
| 1099 | GGCTUACCU | | *SmGG*SmCT*SmUA*SmCC*SmU | | SOSOSOS | chimeric version of | |
| | | | | | | Exon23: Analog of 943 | |
| WV- | GGCCAAACCTC | 444 | mGG*SmCC*SmAA*SmAC*SmCT*Sm | 1196 | OSOSOSOSOSOS | Stereopure DNA/2′OMe | Exon23 |
| 1100 | GGCUTACCU | | CG*SmGC*SmUT*SmAC*SmCmU | | OSOSOSO | chimeric version of | |
| | | | | | | Exon23: Analog of 943 | |
| WV- | GGCCAAACCTC | 445 | G*SG*SmCmCA*SA*SmAmCC*ST*SC | 1197 | SSOOSSOOSSSO | Stereopure DNA/2′OMe | Exon23 |
| 1101 | GGCTUACCU | | *SmGmGC*ST*SmUmAC*SC*SmU | | OSSOOSS | chimeric version of | |
| | | | | | | Exon23: Analog of 943 | |
| WV- | GGCCAAACCUC | 446 | G*SG*SC*SmCmAmAA*SC*SmCmUm | 1198 | SSSOOOSSOOOS | Stereopure DNA/2′OMe | Exon23 |
| 1102 | GGCUUACCU | | CG*SG*SmCmUmUA*SC*SC*SmU | | SOOOSSS | chimeric version of | |
| | | | | | | Exon23: Analog of 943 | |
| WV- | GGCCAAACCTC | 447 | G*SG*SC*SC*SmAmAmAmCC*ST*SC | 1199 | SSSSOOOOSSSO | Stereopure DNA/2′OMe | Exon23 |
| 1103 | GGCUTACCU | | *SmGmGmCmUT*SA*SC*SC*SmU | | OOOSSSS | chimeric version of | |
| | | | | | | Exon23: Analog of 943 | |
| WV- | GGCCAAACCTC | 448 | G*SG*SC*SmCA*SA*SA*SmCC*ST*S | 1200 | SSSOSSSOSSSOS | Stereopure DNA/2′OMe | Exon23 |
| 1104 | GGCTUACCU | | C*SmGG*SC*ST*SmUA*SC*SC*SmU | | SSOSSS | chimeric version of | |
| | | | | | | Exon23: Analog of 943 | |
| WV- | GGCCAAACCUC | 449 | mGmGmCmCA*SA*SA*SC*SC*SmUm | 1201 | OOOOSSSSSOO | Stereopure DNA/2′OMe | Exon23 |
| 1105 | GGCTTACCU | | CmGmGmCT*ST*SA*SC*SC*SmU | | OOOSSSS | chimeric version of | |
| | | | | | | Exon23: Analog of 943 | |
| WV- | GGCCAAACCUC | 450 | G*G*C*C*A*mAmAmCmCmUmCmGm | 1202 | XXXXXOOOOO | Stereorandom | Exon23 |
| 1121 | GGCTTACCT | | GmCT*T*A*C*C*T | | OOOOXXXXX | DNA/2′OMe chimeric | |
| | | | | | | version of Exon23: | |
| | | | | | | Analog of WV1097 | |
| WV- | GGCCAAACCTC | 451 | mGmGmCmCA*A*A*mCC*T*C*G*mG | 1203 | OOOOXXXOXX | Stereorandom | Exon23 |
| 1122 | GGCTTACCU | | C*T*T*mAmCmCmU | | XXOXXXOOO | DNA/2′OMe chimeric | |
| | | | | | | version of Exon23: | |
| | | | | | | Analog of WV1098 | |
| WV- | GGCCAAACCUC | 452 | G*mGC*mCA*mAA*mCC*mUC*mGG | 1204 | XOXOXOXOXO | Stereorandom | Exon23 |
| 1123 | GGCTUACCU | | *mCT*mUA*mCC*mU | | XOXOXOXOX | DNA/2′OMe chimeric | |
| | | | | | | version of Exon23: | |
| | | | | | | Analog of WV1099 | |
| WV- | GGCCAAACCTC | 453 | mGG*mCC*mAA*mAC*mCT*mCG*m | 1205 | OXOXOXOXOX | Stereorandom | Exon23 |
| 1124 | GGCUTACCU | | GC*mUT*mAC*mCmU | | OXOXOXOXO | DNA/2′OMe chimeric | |
| | | | | | | version of Exon23: | |
| | | | | | | Analog of WV11OO | |
| WV- | GGCCAAACCTC | 454 | G*G*mCmCA*A*mAmCmCT*C*mGm | 1206 | XXOOXXOOOX | Stereorandom | Exon23 |
| 1125 | GGCTUACCU | | GC*T*mUmAC*C*mU | | XOOXXOOXX | DNA/2′OMe chimeric | |
| | | | | | | version of Exon23: | |
| | | | | | | Analog of WV1101 | |
| WV- | GGCCAAACCUC | 455 | G*G*C*mCmAmAA*C*mCmUmCG*G | 1207 | XXXOOOXXOO | Stereorandom | Exon23 |
| 1126 | GGCUUACCU | | *mCmUmUA*C*C*mU | | OXXOOOXXX | DNA/2′OMe chimeric | |
| | | | | | | version of Exon23: | |
| | | | | | | Analog of WV1102 | |
| WV- | GGCCAAACCTC | 456 | G*G*C*C*mAmAmAmCC*T*C*mGmG | 1208 | XXXXOOOOXX | Stereorandom | Exon23 |
| 1127 | GGCUTACCU | | mCmUT*A*C*C*mU | | XOOOOXXXX | DNA/2′OMe chimeric | |
| | | | | | | version of Exon23: | |
| | | | | | | Analog of WV1103 | |
| WV- | GGCCAAACCTC | 457 | G*G*C*mCA*A*A*mCC*T*C*mGG*C | 1209 | XXXOXXXOXX | Stereorandom | Exon23 |
| 1128 | GGCTUACCU | | *T*mUA*C*C*mU | | XOXXXOXXX | DNA/2′OMe chimeric | |
| | | | | | | version of Exon23: | |
| | | | | | | Analog of WV1104 | |
| WV- | GGCCAAACCUC | 458 | mGmGmCmCA*A*A*C*C*mUmCmGm | 1210 | OOOOXXXXXO | Stereorandom | Exon23 |
| 1129 | GGCTTACCU | | GmCT*T*A*C*C*mU | | OOOOXXXXX | DNA/2′OMe chimeric | |
| | | | | | | version of Exon23: | |
| | | | | | | Analog of WV1105 | |
| WV- | GGCCAAACCUC | 459 | G*G*mCmCmAmAmAmCmCmUC*mG | 1211 | XXOOOOOOOO | Stereorandom | Exon23 |
| 1130 | GGCUTACCU | | mGC*mUT*A*C*C*mU | | XOOXOXXXX | DNA/2′OMe chimeric | |
| | | | | | | version of Exon23: | |
| | | | | | | Analog of WV1106 | |
| WV- | GGCCAAACCUC | 460 | mG*mG*mC*mC*mA*mAmAmCmCm | 1212 | XXXXXOOOOO | Stereorandom 2′OMe | Exon23 |
| 1141 | GGCUUACCU | | UmCmGmGmCmU*mU*mA*mC*mC* | | OOOOXXXXX | PO/PS chimeric version | |
| | | | mU | | | of exon23: Analog of | |
| | | | | | | WV1097 | |
| WV- | GGCCAAACCUC | 461 | mGmGmCmCmA*mA*mA*mCmC*mU | 1213 | OOOOXXXOXX | Stereorandom 2′OMe | Exon23 |
| 1142 | GGCUUACCU | | *mC*mG*mGmC*mU*mU*mAmCmCmU | | XXOXXXOOO | PO/PS chimeric version | |
| | | | | | | of exon23: Analog of | |
| | | | | | | WV1098 | |
| WV- | GGCCAAACCUC | 462 | mG*mGmC*mCmA*mAmA*mCmC*m | 1214 | XOXOXOXOXO | Stereorandom 2′OMe | Exon23 |
| 1143 | GGCUUACCU | | UmC*mGmG*mCmU*mUmA*mCmC* | | XOXOXOXOX | PO/PS chimeric version | |
| | | | mU | | | of exon23: Analog of | |
| | | | | | | WV1099 | |
| WV- | GGCCAAACCUC | 463 | mGmG*mCmC*mAmA*mAmC*mCmU | 1215 | OXOXOXOXOX | Stereorandom 2′OMe | Exon23 |
| 1144 | GGCUUACCU | | *mCmG*mGmC*mUmU*mAmC*mCmU | | OXOXOXOXO | PO/PS chimeric version | |
| | | | | | | of exon23: Analog of | |
| | | | | | | WV1100 | |
| WV- | GGCCAAACCUC | 464 | mG*mG*mCmCmA*mA*mAmCmCmU | 1216 | XXOOXXOOOX | Stereorandom 2′OMe | Exon23 |
| 1145 | GGCUUACCU | | *mC*mGmGmC*mU*mUmAmC*mC*mU | | XOOXXOOXX | PO/PS chimeric version | |
| | | | | | | of exon23: Analog of | |
| | | | | | | WV1101 | |
| WV- | GGCCAAACCUC | 465 | mG*mG*mC*mCmAmAmA*mC*mCm | 1217 | XXXOOOXXOO | Stereorandom 2′OMe | Exon23 |
| 1146 | GGCUUACCU | | UmCmG*mG*mCmUmUmA*mC*mC* | | OXXOOOXXX | PO/PS chimeric version | |
| | | | mU | | | of exon23: Analog of | |
| | | | | | | WV1102 | |
| WV- | GGCCAAACCUC | 466 | mG*mG*mC*mC*mAmAmAmCmC*m | 1218 | XXXXOOOOXX | Stereorandom 2′OMe | Exon23 |
| 1147 | GGCUUACCU | | U*mC*mGmGmCmUmU*mA*mC*mC* | | XOOOOXXXX | PO/PS chimeric version | |
| | | | mU | | | of exon23: Analog of | |
| | | | | | | WV1103 | |
| WV- | GGCCAAACCUC | 467 | mG*mG*mC*mCmA*mA*mA*mCmC* | 1219 | XXXOXXXOXX | Stereorandom 2′OMe | Exon23 |
| 1148 | GGCUUACCU | | mU*mC*mGmG*mC*mU*mUmA*mC* | | XOXXXOXXX | PO/PS chimeric version | |
| | | | mC*mU | | | of exon23: Analog of | |
| | | | | | | WV1104 | |
| WV- | GGCCAAACCUC | 468 | mGmGmCmCmA*mA*mA*mC*mC*m | 1220 | OOOOXXXXXO | Stereorandom 2′OMe | Exon23 |
| 1149 | GGCUUACCU | | UmCmGmGmCmU*mU*mA*mC*mC* | | OOOOXXXXX | PO/PS chimeric version | |
| | | | mU | | | of exon23: Analog of | |
| | | | | | | WV1105 | |
| WV- | GGCCAAACCUC | 469 | mG*mG*mCmCmAmAmAmCmCmUm | 1221 | XXOOOOOOOO | Stereorandom 2′OMe | Exon23 |
| 1150 | GGCUUACCU | | C*mGmGmC*mUmU*mA*mC*mC*mU | | XOOXOXXXX | PO/PS chimeric version | |
| | | | | | | of exon23: Analog of | |
| | | | | | | WV1106 | |
| WV- | GGCCAAACCUC | 470 | L001*mG*mG*mC*mC*mA*mA*mA* | 1222 | XXXXXXXXXX | All-OMe full-PS | Exon23 |
| 2733 | GGCUUACCU | | mC*mC*mU*mC*mG*mG*mC*mU*m | | XXXXXXXXXX | | |
| | | | U*mA*mC*mC*mU | | | | |
| WV- | GGCCAAACCUC | 471 | L001*mG*mG*mC*mC*mA*mA*mA* | 1223 | XXXXXXXXXX | All-OMe full-PS | Exon23 |
| 2734 | GGCUUACCUG | | mC*mC*mU*mC*mG*mG*mC*mU*m | | XXXXXXXXXX | | |
| | AAAU | | U*mA*mC*mC*mU*mG*mA*mA*mA* | | XXXXX | | |
| | | | mU | | | | |
| WV- | GGCCAAACCUC | 472 | G*SG*SmCmCmAmAmAmCmCmUC*S | 1224 | SSOOOOOOOOS | Stereopure DNA/2′OMe | Exon51 |
| 1106 | GGCUTACCU | | mGmGC*SmUT*SA*SC*SC*SmU | | OOSOSSSS | chimeric version of | |
| | | | | | | Exon23: Analog of 943 | |
| WV- | TCAAGGAAGAT | 473 | T*C*A*A*G*G*A*A*G*A*T*G*G*C* | 1225 | XXXXXXXXXX | Stereorandom DNA | Exon51 |
| 1107 | GGCATTTCT | | A*T*T*T*C*T | | XXXXXXXXX | version of Exon51 full | |
| | | | | | | PS: Analog of WV942 | |
| WV- | UCAAGGAAGA | 474 | mUmCmAmAmGmGmAmAmGmAmU | 1226 | OOOOOOOOOO | Full PO version of | Exon51 |
| 1108 | UGGCAUUUCU | | mGmGmCmAmUmUmUmCmU | | OOOOOOOOO | WV942 | |
| WV- | TCAAGGAAGAT | 475 | T*RC*RA*RA*RG*RG*RA*RA*RG*R | 1227 | RRRRRRRRRRR | Full Rp DNA version of | Exon51 |
| 1109 | GGCATTTCT | | A*RT*RG*RG*RC*RA*RT*RT*RT*RC | | RRRRRRRR | Exon51: Analog of | |
| | | | *RT | | | WV942 | |
| WV- | TCAAGGAAGAT | 476 | T*SC*SA*SA*SG*SG*SA*SA*SG*SA* | 1228 | SSSSSSSSSSSSSS | Full Rp DNA version of | Exon51 |
| 1110 | GGCATTTCT | | ST*SG*SG*SC*SA*ST*ST*ST*SC*ST | | SSSSS | Exon51: Analog of | |
| | | | | | | WV942 | |
| WV- | TCAAGGAAGA | 477 | T*SC*SA*SA*SG*SmGmAmAmGmAm | 1229 | SSSSSOOOOOO | Stereopure DNA/2′OMe | Exon51 |
| 1111 | UGGCATTTCT | | UmGmGmCA*ST*ST*ST*SC*ST | | OOOSSSSS | chimeric version of | |
| | | | | | | Exon51: Analog of 942 | |
| WV- | UCAAGGAAGA | 478 | mUmCmAmAG*SG*SA*SmAG*SA*ST | 1230 | OOOOSSSOSSSS | Stereopure DNA/2′OMe | Exon51 |
| 1112 | TGGCATUUCU | | *SG*SmGC*SA*ST*SmUmUmCmU | | OSSSOOO | chimeric version of | |
| | | | | | | Exon51: Analog of 942 | |
| WV- | TCAAGGAAGAT | 479 | T*SmCA*SmAG*SmGA*SmAG*SmAT | 1231 | SOSOSOSOSOSO | Stereopure DNA/2′OMe | Exon51 |
| 1113 | GGCAUTUCU | | *SmGG*SmCA*SmUT*SmUC*SmU | | SOSOSOS | chimeric version of | |
| | | | | | | Exon51: Analog of 942 | |
| WV- | UCAAGGAAGA | 480 | mUC*SmAA*SmGG*SmAA*SmGA*Sm | 1232 | OSOSOSOSOSOS | Stereopure DNA/2′OMe | Exon51 |
| 1114 | UGGCATUTCU | | UG*SmGC*SmAT*SmUT*SmCmU | | OSOSOSO | chimeric version of | |
| | | | | | | Exon51: Analog of 942 | |
| WV- | TCAAGGAAGAT | 481 | T*SC*SmAmAG*SG*SmAmAG*SA*ST | 1233 | S SOOSSOOSSSO | Stereopure DNA/2′OMe | Exon51 |
| 1115 | GGCAUUTCU | | *SmGmGC*SA*SmUmUT*SC*SmU | | OSSOOSS | chimeric version of | |
| | | | | | | Exon51: Analog of 942 | |
| WV- | TCAAGGAAGA | 482 | T*SC*SA*SmAmGmGA*SA*SmGmAm | 1234 | SSSOOOSSOOOS | Stereopure DNA/2′OMe | Exon51 |
| 1116 | UGGCAUTTCU | | UG*SG*SmCmAmUT*ST*SC*SmU | | SOOOSSS | chimeric version of | |
| | | | | | | Exon51: Analog of 942 | |
| WV- | TCAAGGAAGAT | 483 | T*SC*SA*SA*SmGmGmAmAG*SA*ST | 1235 | SSSSOOOOSSSO | Stereopure DNA/2′OMe | Exon51 |
| 1117 | GGCATTTCU | | *SmGmGmCmAT*ST*ST*SC*SmU | | OOOSSSS | chimeric version of | |
| | | | | | | Exon51: Analog of 942 | |
| WV- | TCAAGGAAGAT | 484 | T*SC*SA*SmAG*SG*SA*SmAG*SA*S | 1236 | SSSOSSSOSSSOS | Stereopure DNA/2′OMe | Exon51 |
| 1118 | GGCAUTTCU | | T*SmGG*SC*SA*SmUT*ST*SC*SmU | | SSOSSS | chimeric version of | |
| | | | | | | Exon51: Analog of 942 | |
| WV- | UCAAGGAAGA | 485 | mUmCmAmAG*SG*SA*SA*SG*SmAm | 1237 | OOOOSSSSSOO | Stereopure DNA/2′OMe | Exon51 |
| 1119 | UGGCATTTCU | | UmGmGmCA*ST*ST*ST*SC*SmU | | OOOSSSSS | chimeric version of | |
| | | | | | | Exon51: Analog of 942 | |
| WV- | TCAAGGAAGAT | 486 | T*SC*SmAmAmGmGmAmAmGmAT*S | 1238 | SSOOOOOOOOS | Stereopure DNA/2′OMe | Exon51 |
| 1120 | GGCATTTCU | | mGmGC*SmAT*ST*ST*SC*SmU | | OOSOSSSS | chimeric version of | |
| | | | | | | Exon51: Analog of 942 | |
| WV- | TCAAGGAAGA | 487 | T*C*A*A*G*mGmAmAmGmAmUmG | 1239 | XXXXXOOOOO | Stereorandom | Exon51 |
| 1131 | UGGCATTTCT | | mGmCA*T*T*T*C*T | | OOOOXXXXX | DNA/2′OMe chimeric | |
| | | | | | | version of Exon51: | |
| | | | | | | Analog of WV1111 | |
| WV- | UCAAGGAAGA | 488 | mUmCmAmAG*G*A*mAG*A*T*G*m | 1240 | OOOOXXXOXX | Stereorandom | Exon51 |
| 1132 | TGGCATUUCU | | GC*A*T*mUmUmCmU | | XXOXXXOOO | DNA/2′OMe chimeric | |
| | | | | | | version of Exon51: | |
| | | | | | | Analog of WV1112 | |
| WV- | TCAAGGAAGAT | 489 | T*mCA*mAG*mGA*mAG*mAT*mGG | 1241 | XOXOXOXOXO | Stereorandom | Exon51 |
| 1133 | GGCAUTUCU | | *mCA*mUT*mUC*mU | | XOXOXOXOX | DNA/2′OMe chimeric | |
| | | | | | | version of Exon51: | |
| | | | | | | Analog of WV1113 | |
| WV- | UCAAGGAAGA | 490 | mUC*mAA*mGG*mAA*mGA*mUG*m | 1242 | OXOXOXOXOX | Stereorandom | Exon51 |
| 1134 | UGGCATUTCU | | GC*mAT*mUT*mCmU | | OXOXOXOXO | DNA/2′OMe chimeric | |
| | | | | | | version of Exon51: | |
| | | | | | | Analog of WV1114 | |
| WV- | TCAAGGAAGAT | 491 | T*C*mAmAG*G*mAmAG*A*T*mGm | 1243 | XXOOXXOOXX | Stereorandom | Exon51 |
| 1135 | GGCAUUTCU | | GC*A*mUmUT*C*mU | | XOOXXOOXX | DNA/2′OMe chimeric | |
| | | | | | | version of Exon51: | |
| | | | | | | Analog of WV1115 | |
| WV- | TCAAGGAAGA | 492 | T*C*A*mAmGmGA*A*mGmAmUG*G | 1244 | XXXOOOXXOO | Stereorandom | Exon51 |
| 1136 | UGGCAUTTCU | | *mCmAmUT*T*C*mU | | OXXOOOXXX | DNA/2′OMe chimeric | |
| | | | | | | version of Exon51: | |
| | | | | | | Analog of WV1116 | |
| WV- | TCAAGGAAGAT | 493 | T*C*A*A*mGmGmAmAG*A*T*mGm | 1245 | XXXXOOOOXX | Stereorandom | Exon51 |
| 1137 | GGCATTTCU | | GmCmAT*T*T*C*mU | | XOOOOXXXX | DNA/2′OMe chimeric | |
| | | | | | | version of Exon51: | |
| | | | | | | Analog of WV1117 | |
| WV- | TCAAGGAAGAT | 494 | T*C*A*mAG*G*A*mAG*A*T*mGG*C | 1246 | XXXOXXXOXX | Stereorandom | Exon51 |
| 1138 | GGCAUTTCU | | *A*mUT*T*C*mU | | XOXXXOXXX | DNA/2′OMe chimeric | |
| | | | | | | version of Exon51: | |
| | | | | | | Analog of WV1118 | |
| WV- | UCAAGGAAGA | 495 | mUmCmAmAG*G*A*A*G*mAmUmG | 1247 | OOOOXXXXXO | Stereorandom | Exon51 |
| 1139 | UGGCATTTCU | | mGmCA*T*T*T*C*mU | | OOOOXXXXX | DNA/2′OMe chimeric | |
| | | | | | | version of Exon51: | |
| | | | | | | Analog of WV1119 | |
| WV- | TCAAGGAAGAT | 496 | T*C*mAmAmGmGmAmAmGmAT*mG | 1248 | XXOOOOOOOO | Stereorandom | Exon51 |
| 1140 | GGCATTTCU | | mGC*mAT*T*T*C*mU | | XOOXOXXXX | DNA/2′OMe chimeric | |
| | | | | | | version of Exon51: | |
| | | | | | | Analog of WV1120 | |
| WV- | UCAAGGAAGA | 497 | mU*mC*mA*mA*mG*mGmAmAmGm | 1249 | XXXXXOOOOO | Stereorandom 2′OMe | Exon51 |
| 1151 | UGGCAUUUCU | | AmUmGmGmCmA*mU*mU*mU*mC* | | OOOOXXXXX | PO/PS chimeric version | |
| | | | mU | | | of exon51: Analog of | |
| | | | | | | WV1111 | |
| WV- | UCAAGGAAGA | 498 | mUmCmAmAmG*mG*mA*mAmG*mA | 1250 | OOOOXXXOXX | Stereorandom 2′OMe | Exon51 |
| 1152 | UGGCAUUUCU | | *mU*mG*mGmC*mA*mU*mUmUmCmU | | XXOXXXOOO | PO/PS chimeric version | |
| | | | | | | of exon51: Analog of | |
| | | | | | | WV1112 | |
| WV- | UCAAGGAAGA | 499 | mU*mCmA*mAmG*mGmA*mAmG*m | 1251 | XOXOXOXOXO | Stereorandom 2′OMe | Exon51 |
| 1153 | UGGCAUUUCU | | AmU*mGmG*mCmA*mUmU*mUmC* | | XOXOXOXOX | PO/PS chimeric version | |
| | | | mU | | | of exon51: Analog of | |
| | | | | | | WV1113 | |
| WV- | UCAAGGAAGA | 500 | mUmC*mAmA*mGmG*mAmA*mGmA | 1252 | OXOXOXOXOX | Stereorandom 2′OMe | Exon51 |
| 1154 | UGGCAUUUCU | | *mUmG*mGmC*mAmU*mUmU*mCmU | | OXOXOXOXO | PO/PS chimeric version | |
| | | | | | | of exon51: Analog of | |
| | | | | | | WV1114 | |
| WV- | UCAAGGAAGA | 501 | mU*mC*mAmAmG*mG*mAmAmG*m | 1253 | XXOOXXOOXX | Stereorandom 2′OMe | Exon51 |
| 1155 | UGGCAUUUCU | | A*mU*mGmGmC*mA*mUmUmU*mC* | | XOOXXOOXX | PO/PS chimeric version | |
| | | | mU | | | of exon51: Analog of | |
| | | | | | | WV1115 | |
| WV- | UCAAGGAAGA | 502 | mU*mC*mA*mAmGmGmA*mA*mGm | 1254 | XXXOOOXXOO | Stereorandom 2′OMe | Exon51 |
| 1156 | UGGCAUUUCU | | AmUmG*mG*mCmAmUmU*mU*mC* | | OXXOOOXXX | PO/PS chimeric version | |
| | | | mU | | | of exon51: Analog of | |
| | | | | | | WV1116 | |
| WV- | UCAAGGAAGA | 503 | mU*mC*mA*mA*mGmGmAmAmG*m | 1255 | XXXXOOOOXX | Stereorandom 2′OMe | Exon51 |
| 1157 | UGGCAUUUCU | | A*mU*mGmGmCmAmU*mU*mU*mC* | | XOOOOXXXX | PO/PS chimeric version | |
| | | | mU | | | of exon51: Analog of | |
| | | | | | | WV1117 | |
| WV- | UCAAGGAAGA | 504 | mU*mC*mA*mAmG*mG*mA*mAmG* | 1256 | XXXOXXXOXX | Stereorandom 2′OMe | Exon51 |
| 1158 | UGGCAUUUCU | | mA*mU*mGmG*mC*mA*mUmU*mU* | | XOXXXOXXX | PO/PS chimeric version | |
| | | | mC*mU | | | of exon51: Analog of | |
| | | | | | | WV1118 | |
| WV- | UCAAGGAAGA | 505 | mUmCmAmAmG*mG*mA*mA*mG*m | 1257 | OOOOXXXXXO | Stereorandom 2′OMe | Exon51 |
| 1159 | UGGCAUUUCU | | AmUmGmGmCmA*mU*mU*mU*mC* | | OOOOXXXXX | PO/PS chimeric version | |
| | | | mU | | | of exon51: Analog of | |
| | | | | | | WV1119 | |
| WV- | UCAAGGAAGA | 506 | mU*mC*mAmAmGmGmAmAmGmAm | 1258 | XXOOOOOOOO | Stereorandom 2′OMe | Exon51 |
| 1160 | UGGCAUUUCU | | U*mGmGmC*mAmU*mU*mU*mC*mU | | XOOXOXXXX | PO/PS chimeric version | |
| | | | | | | of exon51: Analog of | |
| | | | | | | WV1120 | |
| WV- | AGAAAUGCCA | 507 | rArGrArArArUrGrCrCrArUrCrUrUrCrCr | 1259 | OOOOOOOOOO | RNA | Exon51 |
| 1687 | UCUUCCUUGA | | UrUrGrA | | OOOOOOOOO | | |
| WV- | UCAAGGAAGA | 508 | mU*SmC*SmA*RmA*RmG*RmG*Rm | 1260 | SSRRRRRRRRRR | Exon51: 2S-15R-2S | Exon51 |
| 2363 | UGGCAUUUCU | | A*RmA*RmG*RmA*RmU*RmG*RmG | | RRRRRSS | | |
| | | | *RmC*RmA*RmU*RmU*RmU*SmC*S | | | | |
| | | | mU | | | | |
| WV- | UCAAGGAAGA | 509 | mU*SmC*SmA*SmA*SmG*RmG*RmA | 1261 | SSSSRRRRRRRR | Exon51: 4S-11R-4S | Exon51 |
| 2364 | UGGCAUUUCU | | *RmA*RmG*RmA*RmU*RmG*RmG*R | | RRRSSSS | | |
| | | | mC*RmA*RmU*SmU*SmU*SmC*SmU | | | | |
| WV- | UCAAGGAAGA | 510 | mU*SmC*SmA*SmA*SmG*SmG*RmA | 1262 | SSSSSRRRRRRR | Exon51: 5S-9R-5S | Exon51 |
| 2365 | UGGCAUUUCU | | *RmA*RmG*RmA*RmU*RmG*RmG*R | | RRSSSSS | | |
| | | | mC*RmA*SmU*SmU*SmU*SmC*SmU | | | | |
| WV- | UCAAGGAAGA | 511 | mU*SmCmAmAmGmGmAmAmGmAm | 1263 | SOOOOOOOOOO | Exon51: 1S-17PO-1S | Exon51 |
| 2366 | UGGCAUUUCU | | UmGmGmCmAmUmUmUmC*SmU | | OOOOOOOS | | |
| WV- | UCAAGGAAGA | 512 | mU*SmC*SmAmAmGmGmAmAmGmA | 1264 | SSOOOOOOOOO | Exon51: 2S-15PO-2S | Exon51 |
| 2367 | UGGCAUUUCU | | mUmGmGmCmAmUmUmU*SmC*SmU | | OOOOOOSS | | |
| WV- | UCAAGGAAGA | 513 | mU*SmC*SmA*SmAmGmGmAmAmG | 1265 | SSSOOOOOOOO | Exon51: 3S-13PO-3S | Exon51 |
| 2368 | UGGCAUUUCU | | mAmUmGmGmCmAmUmU*SmU*SmC | | OOOOOSSS | | |
| | | | *SmU | | | | |
| WV- | UCAAGGAAGA | 514 | mU*SmC*SmA*SmA*SmGmGmAmAm | 1266 | SSSSOOOOOOO | Exon51: 4S-11PO-4S | Exon51 |
| 2369 | UGGCAUUUCU | | GmAmUmGmGmCmAmU*SmU*SmU* | | OOOOSSSS | | |
| | | | SmC*SmU | | | | |
| WV- | UCAAGGAAGA | 515 | mU*SmC*SmA*SmA*SmG*SmGmAm | 1267 | SSSSSOOOOOO | Exon51: 5S-9PO-5S | Exon51 |
| 2370 | UGGCAUUUCU | | AmGmAmUmGmGmCmA*SmU*SmU* | | OOOSSSSS | | |
| | | | SmU*SmC*SmU | | | | |
| WV- | UCAAGGAAGA | 516 | mU*mCmAmAmGmGmAmAmGmAmU | 1268 | XOOOOOOOOO | Exon51: 1PS-17PO-1PS | Exon51 |
| 2381 | UGGCAUUUCU | | mGmGmCmAmUmUmUmC*mU | | OOOOOOOOX | stereorandom | |
| WV- | UCAAGGAAGA | 517 | mU*mC*mAmAmGmGmAmAmGmAm | 1269 | XXOOOOOOOO | Exon51: 2PS-15PO-2PS | Exon51 |
| 2382 | UGGCAUUUCU | | UmGmGmCmAmUmUmU*mC*mU | | OOOOOOOXX | stereorandom | |
| WV- | UCAAGGAAGA | 518 | mU*mC*mA*mAmGmGmAmAmGmA | 1270 | XXXOOOOOOO | Exon51: 3PS-13PO-3PS | Exon51 |
| 2383 | UGGCAUUUCU | | mUmGmGmCmAmUmU*mU*mC*mU | | OOOOOOXXX | stereorandom | |
| WV- | UCAAGGAAGA | 519 | mU*mC*mA*mA*mGmGmAmAmGmA | 1271 | XXXXOOOOOO | Exon51: 4PS-11PO-4PS | Exon51 |
| 2384 | UGGCAUUUCU | | mUmGmGmCmAmU*mU*mU*mC*mU | | OOOOOXXXX | stereorandom | |
| WV- | UCAAGGAAGA | 520 | mU*mC*mA*mA*mG*mGmAmAmGm | 1272 | XXXXXOOOOO | Exon51: 5PS-9PO-5PS | Exon51 |
| 2385 | UGGCAUUUCU | | AmUmGmGmCmA*mU*mU*mU*mC* | | OOOOXXXXX | stereorandom | |
| | | | mU | | | | |
| WV- | UCAAGGAAGA | 521 | fU*fC*fA*fA*fG*fG*mAmAmGmAmU | 1273 | XXXXXXOOOO | 6F-8OMe-6F 6PS-7PO- | Exon51 |
| 2432 | UGGCAUUUCU | | mGmGmC*fA*fU*fU*fU*fC*fU | | OOOXXXXXX | 6PS | |
| WV- | UCAAGGAAGA | 522 | fU*fC*fA*fA*fG*mGmAmAmGmAmU | 1274 | XXXXXOOOOO | 5F-10OMe-5F 5PS- | Exon51 |
| 2433 | UGGCAUUUCU | | mGmGmCmA*fU*fU*fU*fC*fU | | OOOOXXXXX | 9PO-5PS | |
| WV- | UCAAGGAAGA | 523 | fU*fC*fA*fA*mGmGmAmAmGmAmU | 1275 | XXXXOOOOOO | 4F-12OMe-4F 4PS- | Exon51 |
| 2434 | UGGCAUUUCU | | mGmGmCmAmU*fU*fU*fC*fU | | OOOOOXXXX | 11PO-4PS | |
| WV- | UCAAGGAAGA | 524 | fU*fC*fA*mAmGmGmAmAmGmAmU | 1276 | XXXOOOOOOO | 3F-14OMe-3F 3PS- | Exon51 |
| 2435 | UGGCAUUUCU | | mGmGmCmAmUmU*fU*fC*fU | | OOOOOOXXX | 13PO-3PS | |
| WV- | UCAAGGAAGA | 525 | fU*fC*mAmAmGmGmAmAmGmAmU | 1277 | XXOOOOOOOO | 2F-16OMe-2F 2PS- | Exon51 |
| 2436 | UGGCAUUUCU | | mGmGmCmAmUmUmU*fC*fU | | OOOOOOOXX | 15PO-2PS | |
| WV- | UCAAGGAAGA | 526 | fU*mCmAmAmGmGmAmAmGmAmU | 1278 | XOOOOOOOOO | 1F-18OMe-1F 1PS- | Exon51 |
| 2437 | UGGCAUUUCU | | mGmGmCmAmUmUmUmC*fU | | OOOOOOOOX | 17PO-1PS | |
| WV- | UCAAGGAAGA | 527 | fU*SfC*SfA*SfA*SfG*SfG*SmAmAmG | 1279 | SSSSSSOOOOOO | 6F-8OMe-6F 6Sp-7PO- | Exon51 |
| 2438 | UGGCAUUUCU | | mAmUmGmGmC*SfA*SfU*SfU*SfU*S | | OSSSSSS | 6Sp | |
| | | | fC*SfU | | | | |
| WV- | UCAAGGAAGA | 528 | fU*SfC*SfA*SfA*SfG*SmGmAmAmG | 1280 | SSSSSOOOOOO | 5F-10OMe-5F 5Sp- | Exon51 |
| 2439 | UGGCAUUUCU | | mAmUmGmGmCmA*SfU*SfU*SfU*Sf | | OOOSSSSS | 9PO-5Sp | |
| | | | C*SfU | | | | |
| WV- | UCAAGGAAGA | 529 | fU*SfC*SfA*SfA*SmGmGmAmAmGm | 1281 | SSSSOOOOOOO | 4F-12OMe-4F 4Sp- | Exon51 |
| 2440 | UGGCAUUUCU | | AmUmGmGmCmAmU*SfU*SfU*SfC*S | | OOOOSSSS | 11PO-4Sp | |
| | | | fU | | | | |
| WV- | UCAAGGAAGA | 530 | fU*SfC*SfA*SmAmGmGmAmAmGmA | 1282 | SSSOOOOOOOO | 3F-14OMe-3F 3Sp- | Exon51 |
| 2441 | UGGCAUUUCU | | mUmGmGmCmAmUmU*SfU*SfC*SfU | | OOOOOSSS | 13PO-3Sp | |
| WV- | UCAAGGAAGA | 531 | fU*SfC*SmAmAmGmGmAmAmGmAm | 1283 | SSOOOOOOOOO | 2F-16OMe-2F 2Sp- | Exon51 |
| 2442 | UGGCAUUUCU | | UmGmGmCmAmUmUmU*SfC*SfU | | OOOOOOSS | 15PO-2Sp | |
| WV- | UCAAGGAAGA | 532 | fU*SmCmAmAmGmGmAmAmGmAmU | 1284 | SOOOOOOOOOO | 1F-18OMe-1F 1Sp- | Exon51 |
| 2443 | UGGCAUUUCU | | mGmGmCmAmUmUmUmC*SfU | | OOOOOOOS | 17PO-1Sp | |
| WV- | UCAAGGAAGA | 533 | fU*SfC*SfA*SfA*SfG*SfG*SmA*RmA | 1285 | SSSSSSRRRRRR | 6F-8OMe-6F 6Sp-7Rp- | Exon51 |
| 2444 | UGGCAUUUCU | | *RmG*RmA*RmU*RmG*RmG*RmC*S | | RSSSSSS | 6Sp | |
| | | | fA*SfU*SfU*SfU*SfC*SfU | | | | |
| WV- | UCAAGGAAGA | 534 | fU*SfC*SfA*SfA*SfG*SmG*RmA*Rm | 1286 | SSSSSSRRRRRRR | 5F-10OMe-5F 5Sp-9Rp- | Exon51 |
| 2445 | UGGCAUUUCU | | A*RmG*RmA*RmU*RmG*RmG*RmC* | | RRSSSSS | 5Sp | |
| | | | RmA*SfU*SfU*SfU*SfC*SfU | | | | |
| WV- | UCAAGGAAGA | 535 | fU*SfC*SfA*SfA*SmG*RmG*RmA*Rm | 1287 | SSSSRRRRRRRR | 4F-12OMe-4F 4Sp- | Exon51 |
| 2446 | UGGCAUUUCU | | A*RmG*RmA*RmU*RmG*RmG*RmC* | | RRRSSSS | 11Rp-4Sp | |
| | | | RmA*RmU*SfU*SfU*SfC*SfU | | | | |
| WV- | UCAAGGAAGA | 536 | fU*SfC*SfA*SmA*RmG*RmG*RmA*R | 1288 | SSSRRRRRRRRR | 3F-14OMe-3F 3Sp- | Exon51 |
| 2447 | UGGCAUUUCU | | mA*RmG*RmA*RmU*RmG*RmG*Rm | | RRRRSSS | 13Rp-3Sp | |
| | | | C*RmA*RmU*RmU*SfU*SfC*SfU | | | | |
| WV- | UCAAGGAAGA | 537 | fU*SfC*SmA*RmA*RmG*RmG*RmA* | 1289 | SSRRRRRRRRRR | 2F-16OMe-2F 2Sp- | Exon51 |
| 2448 | UGGCAUUUCU | | RmA*RmG*RmA*RmU*RmG*RmG*R | | RRRRRSS | 15Rp-2Sp | |
| | | | mC*RmA*RmU*RmU*RmU*SfC*SfU | | | | |
| WV- | UCAAGGAAGA | 538 | fU*SmC*RmA*RmA*RmG*RmG*RmA | 1290 | SRRRRRRRRRR | 1F-18OMe-1F 1Sp- | Exon51 |
| 2449 | UGGCAUUUCU | | *RmA*RmG*RmA*RmU*RmG*RmG*R | | RRRRRRRS | 17Rp-1Sp | |
| | | | mC*RmA*RmU*RmU*RmU*RmC*SfU | | | | |
| WV- | UCAAGGAAGA | 539 | fU*SfC*SfA*SfA*SfG*SfG*SfA*SfA*R | 1291 | SSSSSSSRRRRRS | 7F-6OMe-7F 7Sp-5Rp- | Exon51 |
| 2526 | UGGCAUUUCU | | mG*RmA*RmU*RmG*RmG*SfC*SfA* | | SSSSSS | 7Sp | |
| | | | SfU*SfU*SfU*SfC*SfU | | | | |
| WV- | UCAAGGAAGA | 540 | fU*SfC*SfA*SfA*SfG*SfG*SfA*SfA*S | 1292 | SSSSSSSSRRRSS | 8F-4OMe-8F 8Sp-3Rp- | Exon51 |
| 2527 | UGGCAUUUCU | | mG*RmA*RmU*RmG*SfG*SfC*SfA*Sf | | SSSSSS | 8Sp | |
| | | | U*SfU*SfU*SfC*SfU | | | | |
| WV- | UCAAGGAAGA | 541 | fU*SfC*SfA*SfA*SfG*SfG*SfA*SfA*Sf | 1293 | SSSSSSSSSRSSS | 9F-2OMe-9F 9Sp-1Rp- | Exon51 |
| 2528 | UGGCAUUUCU | | G*SmA*RmU*SfG*SfG*SfC*SfA*SfU* | | SSSSSS | 9Sp | |
| | | | SfU*SfU*SfC*SfU | | | | |
| WV- | UCAAGGAAGA | 542 | fU*SfC*SfA*SfA*SfG*SfG*SfA*SfAm | 1294 | SSSSSSSOOOOO | 7F-6OMe-7F 75p-5PO- | Exon51 |
| 2529 | UGGCAUUUCU | | GmAmUmGmG*SfC*SfA*SfU*SfU*Sf | | SSSSSSS | 7Sp | |
| | | | U*SfC*SfU | | | | |
| WV- | UCAAGGAAGA | 543 | fU*SfC*SfA*SfA*SfG*SfG*SfA*SfA*S | 1295 | SSSSSSSSOOOSS | 8F-4OMe-8F 8Sp-3PO- | Exon51 |
| 2530 | UGGCAUUUCU | | mGmAmUmG*SfG*SfC*SfA*SfU*SfU* | | SSSSSS | 8Sp | |
| | | | SfU*SfC*SfU | | | | |
| WV- | UCAAGGAAGA | 544 | fU*SfC*SfA*SfA*SfG*SfG*SfA*SfA*Sf | 1296 | SSSSSSSSSOSSS | 9F-2OMe-9F 9Sp-1PO- | Exon51 |
| 2531 | UGGCAUUUCU | | G*SmAmU*SfG*SfG*SfC*SfA*SfU*Sf | | SSSSSS | 9Sp | |
| | | | U*SfU*SfC*SfU | | | | |
| WV- | UCAAGGAAGA | 545 | fU*SfC*SfA*SfA*SfG*SfG*SfA*mA*m | 1297 | SSSSSSXXXXXX | 6F-8OMe-6F 65p-7PS- | Exon51 |
| 2532 | UGGCAUUUCU | | G*mA*mU*mG*mG*fC*SfA*SfU*SfU* | | XSSSSSS | 6Sp | |
| | | | SfU*SfC*SfU | | | | |
| WV- | UCAAGGAAGA | 546 | mU*SmC*SmA*SmA*SmG*SmG*SmA | 1298 | SSSSSSRRRRRR | All-OMe 6Sp-7Rp-6Sp | Exon51 |
| 2533 | UGGCAUUUCU | | *RmA*RmG*RmA*RmU*RmG*RmG*R | | RSSSSSS | | |
| | | | mC*SmA*SmU*SmU*SmU*SmC*SmU | | | | |
| WV- | UCAAGGAAGA | 547 | mU*SmC*SmA*SmA*SmG*SmG*SmA | 1299 | SSSSSSSRRRRRS | All-OMe 7Sp-5Rp-7Sp | Exon51 |
| 2534 | UGGCAUUUCU | | *SmA*RmG*RmA*RmU*RmG*RmG*S | | SSSSSS | | |
| | | | mC*SmA*SmU*SmU*SmU*SmC*SmU | | | | |
| WV- | UCAAGGAAGA | 548 | mU*SmC*SmA*SmA*SmG*SmG*SmA | 1300 | SSSSSSSSRRRSS | All-OMe 8Sp-3Rp-8Sp | Exon51 |
| 2535 | UGGCAUUUCU | | *SmA*SmG*RmA*RmU*RmG*SmG*S | | SSSSSS | | |
| | | | mC*SmA*SmU*SmU*SmU*SmC*SmU | | | | |
| WV- | UCAAGGAAGA | 549 | mU*SmC*SmA*SmA*SmG*SmG*SmA | 1301 | SSSSSSSSSRSSS | All-OMe 9Sp-1Rp-9Sp | Exon51 |
| 2536 | UGGCAUUUCU | | *SmA*SmG*SmA*RmU*SmG*SmG*S | | SSSSSS | | |
| | | | mC*SmA*SmU*SmU*SmU*SmC*SmU | | | | |
| WV- | UCAAGGAAGA | 550 | mU*SmC*SmA*SmA*SmG*SmG*SmA | 1302 | SSSSSSXXXXXX | All-OMe 6Sp-7PS-6Sp | Exon51 |
| 2537 | UGGCAUUUCU | | *mA*mG*mA*mU*mG*mG*mC*SmA* | | XSSSSSS | | |
| | | | SmU*SmU*SmU*SmC*SmU | | | | |
| WV- | UCAAGGAAGA | 551 | L001*mU*mC*mA*mA*mG*mG*mA* | 1303 | XXXXXXXXXX | Drisapersen with C6 | Exon51 |
| 2538 | UGGCAUUUCU | | mA*mG*mA*mU*mG*mG*mC*mA*m | | XXXXXXXXXX | amino linker | |
| | | | U*mU*mU*mC*mU | | | | |
| WV- | UCAAGGAAGA | 552 | Mod013L001*mU*mC*mA*mA*mG*m | 1304 | OXXXXXXXXX | Drisapersen with C6 and | Exon51 |
| 2578 | UGGCAUUUCU | | G*mA*mA*mG*mA*mU*mG*mG*mC* | | XXXXXXXXXXX | Lauric | |
| | | | mA*mU*mU*mU*mC*mU | | | | |
| WV- | UCAAGGAAGA | 553 | Mod014L001*mU*mC*mA*mA*mG*m | 1305 | OXXXXXXXXX | Drisapersen with C6 and | Exon51 |
| 2579 | UGGCAUUUCU | | G*mA*mA*mG*mA*mU*mG*mG*mC* | | XXXXXXXXXXX | Myristic | |
| | | | mA*mU*mU*mU*mC*mU | | | | |
| WV- | UCAAGGAAGA | 554 | Mod005L001*mU*mC*mA*mA*mG*m | 1306 | OXXXXXXXXX | Drisapersen with C6 and | Exon51 |
| 2580 | UGGCAUUUCU | | G*mA*mA*mG*mA*mU*mG*mG*mC* | | XXXXXXXXXXX | Palmitic | |
| | | | mA*mU*mU*mU*mC*mU | | | | |
| WV- | UCAAGGAAGA | 555 | Mod015L001*mU*mC*mA*mA*mG*m | 1307 | OXXXXXXXXX | Drisapersen with C6 and | Exon51 |
| 2581 | UGGCAUUUCU | | G*mA*mA*mG*mA*mU*mG*mG*mC* | | XXXXXXXXXXX | Stearic | |
| | | | mA*mU*mU*mU*mC*mU | | | | |
| WV- | UCAAGGAAGA | 556 | Mod016L001*mU*mC*mA*mA*mG*m | 1308 | OXXXXXXXXX | Drisapersen with C6 and | Exon51 |
| 2582 | UGGCAUUUCU | | G*mA*mA*mG*mA*mU*mG*mG*mC* | | XXXXXXXXXXX | Oleic | |
| | | | mA*mU*mU*mU*mC*mU | | | | |
| WV- | UCAAGGAAGA | 557 | Mod017L001*mU*mC*mA*mA*mG*m | 1309 | OXXXXXXXXX | Drisapersen with C6 and | Exon51 |
| 2583 | UGGCAUUUCU | | G*mA*mA*mG*mA*mU*mG*mG*mC* | | XXXXXXXXXXX | Linoleic | |
| | | | mA*mU*mU*mU*mC*mU | | | | |
| WV- | UCAAGGAAGA | 558 | Mod018L001*mU*mC*mA*mA*mG*m | 1310 | OXXXXXXXXX | Drisapersen with C6 and | Exon51 |
| 2584 | UGGCAUUUCU | | G*mA*mA*mG*mA*mU*mG*mG*mC* | | XXXXXXXXXXX | alpha-Linolenic | |
| | | | mA*mU*mU*mU*mC*mU | | | | |
| WV- | UCAAGGAAGA | 559 | Mod019L001*mU*mC*mA*mA*mG*m | 1311 | OXXXXXXXXX | Drisapersen with C6 and | Exon51 |
| 2585 | UGGCAUUUCU | | G*mA*mA*mG*mA*mU*mG*mG*mC* | | XXXXXXXXXXX | gamma-Linolenic | |
| | | | mA*mU*mU*mU*mC*mU | | | | |
| WV- | UCAAGGAAGA | 560 | Mod006L001*mU*mC*mA*mA*mG*m | 1312 | OXXXXXXXXX | Drisapersen with C6 and | Exon51 |
| 2586 | UGGCAUUUCU | | G*mA*mA*mG*mA*mU*mG*mG*mC* | | XXXXXXXXXXX | DHA | |
| | | | mA*mU*mU*mU*mC*mU | | | | |
| WV- | UCAAGGAAGA | 561 | Mod020L001*mU*mC*mA*mA*mG*m | 1313 | OXXXXXXXXX | Drisapersen with C6 and | Exon51 |
| 2587 | UGGCAUUUCU | | G*mA*mA*mG*mA*mU*mG*mG*mC* | | XXXXXXXXXXX | Turbinaric | |
| | | | mA*mU*mU*mU*mC*mU | | | | |
| WV- | UCAAGGAAGA | 562 | Mod021*mU*mC*mA*mA*mG*mG*m | 1314 | XXXXXXXXXX | Drisapersen with C6 and | Exon51 |
| 2588 | UGGCAUUUCU | | A*mA*mG*mA*mU*mG*mG*mC*mA* | | XXXXXXXXXX | Dilinoleic | |
| | | | mU*mU*mU*mC*mU | | | | |
| WV- | UCAAGGAAGA | 563 | mU*mC*mA*mA*mG*mG*mAmAmG | 1315 | XXXXXXOOOO | All-OMe 6PS-7PO-6PS | Exon51 |
| 2660 | UGGCAUUUCU | | mAmUmGmGmC*mA*mU*mU*mU*m | | OOOXXXXXX | | |
| | | | C*mU | | | | |
| WV- | UCAAGGAAGA | 564 | mU*mC*mA*mA*mG*mG*mA*mAmG | 1316 | XXXXXXXOOO | All-OMe 7PS-5PO-7PS | Exon51 |
| 2661 | UGGCAUUUCU | | mAmUmGmG*mC*mA*mU*mU*mU* | | OOXXXXXXX | | |
| | | | mC*mU | | | | |
| WV- | UCAAGGAAGA | 565 | mU*mC*mA*mA*mG*mG*mA*mA*m | 1317 | XXXXXXXXOO | All-OMe 8PS-3PO-8PS | Exon51 |
| 2662 | UGGCAUUUCU | | GmAmUmG*mG*mC*mA*mU*mU*mU | | OXXXXXXXX | | |
| | | | *mC*mU | | | | |
| WV- | UCAAGGAAGA | 566 | mU*mC*mA*mA*mG*mG*mA*mA*m | 1318 | XXXXXXXXXO | All-OMe 9PS-1PO-9PS | Exon51 |
| 2663 | UGGCAUUUCU | | G*mAmU*mG*mG*mC*mA*mU*mU* | | XXXXXXXXX | | |
| | | | mU*mC*mU | | | | |
| WV- | UCAAGGAAGA | 567 | mU*SmC*SmA*SmA*SmG*SmG*SmA | 1319 | SSSSSSOOOOOO | All-OMe 6Sp-7PO-6Sp | Exon51 |
| 2664 | UGGCAUUUCU | | mAmGmAmUmGmGmC*SmA*SmU*S | | OSSSSSS | | |
| | | | mU*SmU*SmC*SmU | | | | |
| WV- | UCAAGGAAGA | 568 | mU*SmC*SmA*SmA*SmG*SmG*SmA | 1320 | SSSSSSSOOOOO | All-OMe 7Sp-5PO-7Sp | Exon51 |
| 2665 | UGGCAUUUCU | | *SmAmGmAmUmGmG*SmC*SmA*Sm | | SSSSSSS | | |
| | | | U*SmU*SmU*SmC*SmU | | | | |
| WV- | UCAAGGAAGA | 569 | mU*SmC*SmA*SmA*SmG*SmG*SmA | 1321 | SSSSSSSSOOOSS | All-OMe 8Sp-3PO-8Sp | Exon51 |
| 2666 | UGGCAUUUCU | | *SmA*SmGmAmUmG*SmG*SmC*Sm | | SSSSSS | | |
| | | | A*SmU*SmU*SmU*SmC*SmU | | | | |
| WV- | UCAAGGAAGA | 570 | mU*SmC*SmA*SmA*SmG*SmG*SmA | 1322 | SSSSSSSSSOSSS | All-OMe 9Sp-1PO-9Sp | Exon51 |
| 2667 | UGGCAUUUCU | | *SmA*SmG*SmAmU*SmG*SmG*SmC | | SSSSSS | | |
| | | | *SmA*SmU*SmU*SmU*SmC*SmU | | | | |
| WV- | UCAAGGAAGA | 571 | fU*fC*fA*fA*fG*fG*fA*mAmGmAmU | 1323 | XXXXXXXOOO | 7F-6OMe-7F 7PS-5PO- | Exon51 |
| 2668 | UGGCAUUUCU | | mGmG*fC*fA*fU*fU*fU*fC*fU | | OOXXXXXXX | 7PS | |
| WV- | UCAAGGAAGA | 572 | fU*fC*fA*fA*fG*fG*fA*fA*mGmAmU | 1324 | XXXXXXXXOO | 8F-4OMe-8F 8PS-3PO- | Exon51 |
| 2669 | UGGCAUUUCU | | mG*fG*fC*fA*fil*fLi*fU*fC*fU | | OXXXXXXXX | 8PS | |
| WV- | UCAAGGAAGA | 573 | fU*fC*fA*fA*fG*fG*fA*fA*fG*mAmU | 1325 | XXXXXXXXXO | 9F-2OMe-9F 9PS-1PO- | Exon51 |
| 2670 | UGGCAUUUCU | | *fG*fG*fC*fAqUqUqU*fC*fU | | XXXXXXXXX | 9PS | |
| WV- | UCAAGGAAGA | 574 | fU*SfC*SfA*SfA*SfG*SfG*SmAmAmG | 1326 | SSSSSSOOOROO | | DMD |
| 2737 | UGGCAUUUCU | | mA*RmUmGmGmC*SfA*SfU*SfU*SfU | | OSSSSSS | | |
| | | | *SfC*SfU | | | | |
| WV- | UCAAGGAAGA | 575 | fU*SfC*SfA*SfA*SfG*SfG*SmAmAmG | 1327 | SSSSSSOORRRO | | Exon 51 |
| 2738 | UGGCAUUUCU | | *RmA*RmU*RmGmGmC*SfA*SfU*Sf | | OSSSSSS | | |
| | | | U*SfU*SfC*SfU | | | | |
| WV- | UCAAGGAAGA | 576 | fU*SfC*SfA*SfA*SfG*SfG*SmAmA*R | 1328 | SSSSSSORRRRR | | Exon 51 |
| 2739 | UGGCAUUUCU | | mG*RmA*RmU*RmG*RmGmC*SfA*Sf | | OSSSSSS | | |
| | | | U*SfU*SfU*SfC*SfU | | | | |
| WV- | UCAAGGAAGA | 577 | fU*SfC*SfA*SfA*SfG*SfG*SmA*RmA | 1329 | SSSSSSRROOOR | | Exon 51 |
| 2740 | UGGCAUUUCU | | *RmGmAmUmG*RmG*RmC*SfA*SfU* | | RSSSSSS | | |
| | | | SfU*SfU*SfC*SfU | | | | |
| WV- | UCAAGGAAGA | 578 | fU*SfC*SfA*SfA*SfG*SfG*SmA*RmA | 1330 | SSSSSSROOOOO | | Exon 51 |
| 2741 | UGGCAUUUCU | | mGmAmUmGmG*RmC*SfA*SfU*SfU* | | RSSSSSS | | |
| | | | SfU*SfC*SfU | | | | |
| WV- | UCAAGGAAGA | 579 | fU*SfC*SfA*SfA*SfG*SfG*SmA*SmA* | 1331 | SSSSSSSSOOOSS | | Exon 51 |
| 2742 | UGGCAUUUCU | | SmGmAmUmG*SmG*SmC*SfA*SfU*S | | SSSSSS | | |
| | | | fU*SfU*SfC*SfU | | | | |
| WV- | UCAAGGAAGA | 580 | fU*SfC*SfA*SfA*SfG*SfG*SmA*SmA | 1332 | SSSSSSSOOOOO | | Exon 51 |
| 2743 | UGGCAUUUCU | | mGmAmUmGmG*SmC*SfA*SfU*SfU* | | SSSSSSS | | |
| | | | SfU*SfC*SfU | | | | |
| WV- | UCAAGGAAGA | 581 | fU*SfC*SfA*SfA*SfG*SfG*SmA*SmA* | 1333 | SSSSSSSSSSSSSS | | Exon 51 |
| 2744 | UGGCAUUUCU | | SmG*SmA*SmU*SmG*SmG*SmC*SfA | | SSSSS | | |
| | | | *SfU*SfU*SfU*SfC*SfU | | | | |
| WV- | UCAAGGAAGA | 582 | fU*SfC*SfA*SfA*SfG*SfG*SmAmAmG | 1334 | SSSSSSOOOOSO | | Exon 51 |
| 2745 | UGGCAUUUCU | | mAfU*SmGmG*SfC*SfA*SfU*SfU*SfU | | SSSSSSS | | |
| | | | *SfC*SfU | | | | |
| WV- | UCAAGGAAGA | 583 | fU*SfC*SfA*SfA*SfG*SfG*SmA*RmA | 1335 | SSSSSSRRRRSRS | | Exon 51 |
| 2746 | UGGCAUUUCU | | *RmG*RmA*RfU*SmG*RmG*SfC*SfA | | SSSSSS | | |
| | | | *SfU*SfU*SfU*SfC*SfU | | | | |
| WV- | UCAAGGAAGA | 584 | fU*SfC*SfA*SfA*SmG*SmG*SfAfAmG | 1336 | SSSSSSOOOOSO | | Exon 51 |
| 2747 | UGGCAUUUCU | | mAfU*SmGmG*SfC*SfA*SfU*SfU*SfU | | SSSSSSS | | |
| | | | *SfC*SfU | | | | |
| WV- | UCAAGGAAGA | 585 | fU*SfC*SfA*SfA*SmG*SmG*SfA*RfA | 1337 | SSSSSSRRRRSRS | | Exon 51 |
| 2748 | UGGCAUUUCU | | *RmG*RmA*RfU*SmG*RmG*SfC*SfA | | SSSSSS | | |
| | | | *SfU*SfU*SfU*SfC*SfU | | | | |
| WV- | UCAAGGAAGA | 586 | fU*SfC*SfA*SfA*SfG*SfG*SfA*SmAm | 1338 | SSSSSSSOOOOO | | Exon 51 |
| 2749 | UGGCAUUUCU | | GmAmUmGmG*SfC*SfA*SfU*SfU*Sf | | SSSSSSS | | |
| | | | U*SfC*SfU | | | | |
| WV- | UCAAGGAAGA | 587 | fU*SfC*SfA*SfA*SfG*SfG*SfA*SmA* | 1339 | SSSSSSSRRRRRS | | Exon 51 |
| 2750 | UGGCAUUUCU | | RmG*RmA*RmU*RmG*RmG*SfC*SfA | | SSSSSS | | |
| | | | *SfU*SfU*SfU*SfC*SfU | | | | |
| WV- | UCAAGGAAGA | 588 | mU*SmC*SmA*SfA*SfG*SfG*SmA*R | 1340 | SSSSSSRRRRRR | | Exon 51 |
| 2791 | UGGCAUUUCU | | mA*RmG*RmA*RmU*RmG*RmG*Rm | | RSSSSSS | | |
| | | | C*SfA*SfU*SfU*SmU*SmC*SmU | | | | |
| WV- | UCAAGGAAGA | 589 | mU*SmC*SmA*SfA*SfG*SfG*SfA*Sm | 1341 | SSSSSSSRRRRRS | | Exon 51 |
| 2792 | UGGCAUUUCU | | A*RmG*RmA*RmU*RmG*RmG*SfC*S | | SSSSSS | | |
| | | | fA*SfU*SfU*SmU*SmC*SmU | | | | |
| WV- | UCAAGGAAGA | 590 | mU*SmC*SmA*SfA*SfG*SfG*SfA*SfA | 1342 | SSSSSSSSRRRSS | | Exon 51 |
| 2793 | UGGCAUUUCU | | *SmG*RmA*RmU*RmG*SfG*SfC*SfA | | SSSSSS | | |
| | | | *SfU*SfU*SmU*SmC*SmU | | | | |
| WV- | UCAAGGAAGA | 591 | mU*SmC*SmA*SfA*SfG*SfG*SfA*SfA | 1343 | SSSSSSSSSRSSS | | Exon 51 |
| 2794 | UGGCAUUUCU | | *SfG*SmA*RmU*SfG*SfG*SfC*SfA*Sf | | SSSSSS | | |
| | | | U*SfU*SmU*SmC*SmU | | | | |
| WV- | UCAAGGAAGA | 592 | mU*SmC*SmA*SfA*SfG*SfG*SfA*SfA | 1344 | SSSSSSSSOOOSS | | Exon 51 |
| 2795 | UGGCAUUUCU | | *SmGmAmUmG*SfG*SfC*SfA*SfU*Sf | | SSSSSS | | |
| | | | U*SmU*SmC*SmU | | | | |
| WV- | UCAAGGAAGA | 593 | mU*SmC*SmA*SfA*SfG*SfG*SfA*SfA | 1345 | SSSSSSSSSOSSS | | Exon 51 |
| 2796 | UGGCAUUUCU | | *SfG*SmAmU*SfG*SfG*SfC*SfA*SfU* | | SSSSSS | | |
| | | | SfU*SmU*SmC*SmU | | | | |
| WV- | UCAAGGAAGA | 594 | fU*fC*fA*fA*fG*fG*fA*fA*mG*mA*m | 1346 | XXXXXXXXXX | randomer based on WV- | DMD |
| 2797 | UGGCAUUUCU | | U*mG*mG*fC*fA*fU*fU*fU*fC*fU | | XXXXXXXXX | 2526 | |
| WV- | UCAAGGAAGA | 595 | fU*fC*fA*fA*fG*fG*fA*fA*mG*mA*m | 1347 | XXXXXXXXXX | randomer based on WV- | DMD |
| 2798 | UGGCAUUUCU | | U*mG*fG*fC*fA*fU*fU*fU*fC*fU | | XXXXXXXXX | 2527 | |
| WV- | UCAAGGAAGA | 596 | fU*fC*fA*fA*fG*fG*fA*fA*fG*mA*m | 1348 | XXXXXXXXXX | randomer based on WV- | DMD |
| 2799 | UGGCAUUUCU | | U*fG*fG*fC*fA*fU*fU*fU*fC*fU | | XXXXXXXXX | 2528 | |
| WV- | UCAAGGAAGA | 597 | fU*fC*fA*fA*fG*fG*fA*mA*mG*mA* | 1349 | XXXXXXXXXX | randomer based on WV- | DMD |
| 2800 | UGGCAUUUCU | | mU*mG*mG*fC*fA*fU*fU*fU*fC*fU | | XXXXXXXXX | 2750 | |
| WV- | UCAAGGAAGA | 598 | mU*mC*mA*fA*fG*fG*mA*mA*mG* | 1350 | XXXXXXXXXX | randomer based on WV- | DMD |
| 2801 | UGGCAUUUCU | | mA*mU*mG*mG*mC*fA*fU*fU*mU* | | XXXXXXXXX | 2791 | |
| | | | mC*mU | | | | |
| WV- | UCAAGGAAGA | 599 | mU*mC*mA*fA*fG*fG*fA*mA*mG*m | 1351 | XXXXXXXXXX | randomer based on WV- | DMD |
| 2802 | UGGCAUUUCU | | A*mU*mG*mG*fC*fA*fU*fU*mU*mC | | XXXXXXXXX | 2792 | |
| | | | *mU | | | | |
| WV- | UCAAGGAAGA | 600 | mU*mC*mA*fA*fG*fG*fA*fA*mG*m | 1352 | XXXXXXXXXX | randomer based on WV- | DMD |
| 2803 | UGGCAUUUCU | | A*mU*mG*fG*fC*fA*fU*fU*mU*mC* | | XXXXXXXXX | 2793 | |
| | | | mU | | | | |
| WV- | UCAAGGAAGA | 601 | mU*mC*mA*fA*fG*fG*fA*fA*fG*mA | 1353 | XXXXXXXXXX | randomer based on WV- | DMD |
| 2804 | UGGCAUUUCU | | *mU*fG*fG*fC*fA*fU*fU*mU*mC*mU | | XXXXXXXXX | 2794 | |
| WV- | UCAAGGAAGA | 602 | mU*mC*mA*fA*fG*fG*fA*fA*mGmA | 1354 | XXXXXXXXOO | randomer based on WV- | DMD |
| 2805 | UGGCAUUUCU | | mUmG*fG*fC*fA*fU*fU*mU*mC*mU | | OXXXXXXXX | 2795 | |
| WV- | UCAAGGAAGA | 603 | mU*mC*mA*fA*fG*fG*fA*fA*fG*mA | 1355 | XXXXXXXXXO | randomer based on WV- | DMD |
| 2806 | UGGCAUUUCU | | mU*fG*fG*fC*fA*fU*fU*mU*mC*mU | | XXXXXXXXX | 2796 | |
| WV- | UCAAGGAAGA | 604 | Mod024L001*mU*mC*mA*mA*mG*m | 1356 | XXXXXXXXXX | All-OMe full-PS | Exon 51 |
| 2807 | UGGCAUUUCU | | G*mA*mA*mG*mA*mU*mG*mG*mC* | | XXXXXXXXXX | TriGlcNAc conjugated | |
| | | | mA*mU*mU*mU*mC*mU | | | WV942 C6 PS | |
| WV- | UCAAGGAAGA | 605 | Mod026L001*mU*mC*mA*mA*mG*m | 1357 | XXXXXXXXXX | All-OMe full-PS | Exon 51 |
| 2808 | UGGCAUUUCU | | G*mA*mA*mG*mA*mU*mG*mG*mC* | | XXXXXXXXXX | TrialphaMannose | |
| | | | mA*mU*mU*mU*mC*mU | | | conjugated WV942 C6 | |
| | | | | | | PS | |
| WV- | UCAAGGAAGA | 606 | fU*fC*fA*fA*fG*fG*mA*mA*mG*mA | 1358 | XXXXXXXXXX | WV-1714 based BrdU in | DMD |
| 2812 | TGGCAUUUCU | | *BrdU*mG*mG*mC*fA*fU*fU*fU*fC* | | XXXXXXXXX | the center | exon 51 |
| | | | fU | | | | |
| WV- | UCAAGGAAGA | 607 | fU*fC*fA*fA*fG*fG*fA*fA*fG*mA*Br | 1359 | XXXXXXXXXX | WV-2528 and WV-2799 | DMD |
| 2813 | TGGCAUUUCU | | dU*fG*fG*fC*fA*fU*fU*fU*fC*fU | | XXXXXXXXX | based randomer BrdU in | exon 51 |
| | | | | | | the center | |
| WV- | UCAAGGAAGA | 608 | mU*mC*mA*mA*mG*mG*mA*mA*m | 1360 | XXXXXXXXXX | WV-942 based BrdU in | DMD |
| 2814 | TGGCAUUUCU | | G*mA*BrdU*mG*mG*mC*mA*mU*m | | XXXXXXXXX | the center | exon 51 |
| | | | U*mU*mC*mU | | | | |
| WV- | UCAAGGAAGA | 609 | fU*SfC*SfA*SfA*SfG*SfG*SfA*SfA*S | 1361 | SSSSSSSSOOOSS | WV-2530 based, BrdU | Exon 51 |
| 3017 | TGGCAUUUCU | | mGmABrdUmG*SfG*SfC*SfA*SfU*Sf | | SSSSSS | in the middle | |
| | | | U*SfU*SfC*SfU | | | | |
| WV- | UCAAGGAAGA | 610 | fU*fC*fA*fA*fG*fG*fA*fA*mGmABrd | 1362 | XXXXXXXXOO | WV-2530 based, | Exon 51 |
| 3018 | TGGCAUUUCU | | UmG*fG*fC*fA*fU*fU*fU*fC*fU | | OXXXXXXXX | randomer, BrdU in the | |
| | | | | | | middle | |
| WV- | UCAAGGAAGA | 611 | fU*SfC*SfA*SfA*SfG*SfG*SmAmAmG | 1363 | SSSSSSOOOOOO | WV-2438 based, BrdU | Exon 51 |
| 3019 | TGGCAUUUCU | | mABrdUmGmGmC*SfA*SfU*SfU*SfU* | | OSSSSSS | in the middle | |
| | | | SfC*SfU | | | | |
| WV- | UCAAGGAAGA | 612 | fU*fC*fA*fA*fG*fG*mAmAmGmABrd | 1364 | XXXXXXOOOO | WV-2438 based, | Exon 51 |
| 3020 | TGGCAUUUCU | | UmGmGmC*fA*fU*fU*fU*fC*fU | | OOOXXXXXX | randomer, BrdU in the | |
| | | | | | | middle | |
| WV- | UCAAGGAAGA | 613 | L001*fU*SfC*SfA*SfA*SfG*SfG*SmA | 1365 | XSSSSSSOOOOO | WV-2438 based; C6 PS; | DMD |
| 3022 | UGGCAUUUCU | | mAmGmAmUmGmGmC*SfA*SfU*SfU | | OOSSSSSS | on support; used for | |
| | | | *SfU*SfC*SfU | | | conjugation | |
| WV- | UCAAGGAAGA | 614 | Mod015L001*fU*SfC*SfA*SfA*SfG*Sf | 1366 | OXSSSSSSOOOO | WV-2438 based; | DMD |
| 3023 | UGGCAUUUCU | | G*SmAmAmGmAmUmGmGmC*SfA*S | | OOOSSSSSS | conjugate with stearic | |
| | | | fU*SfU*SfU*SfC*SfU | | | acid C6 PS | |
| WV- | UCAAGGAAGA | 615 | Mod006L001*fU*SfC*SfA*SfA*SfG*Sf | 1367 | OXSSSSSSOOOO | WV-2438 based; | DMD |
| 3024 | UGGCAUUUCU | | G*SmAmAmGmAmUmGmGmC*SfA*S | | OOOSSSSSS | conjugate with DHA C6 | |
| | | | fU*SfU*SfU*SfC*SfU | | | PS | |
| WV- | UCAAGGAAGA | 616 | L001*fU*SfC*SfA*SfA*SfG*SfG*SfA* | 1368 | XSSSSSSSSOOO | WV-2530 based; C6 PS; | DMD |
| 3025 | UGGCAUUUCU | | SfA*SmGmAmUmG*SfG*SfC*SfA*SfU | | SSSSSSSS | on support; used for | |
| | | | *SfU*SfU*SfC*SfU | | | conjugation | |
| WV- | UCAAGGAAGA | 617 | Mod015L001*fU*SfC*SfA*SfA*SfG*Sf | 1369 | OXSSSSSSSSOO | WV-2530 based; | DMD |
| 3026 | UGGCAUUUCU | | G*SfA*SfA*SmGmAmUmG*SfG*SfC* | | OSSSSSSSS | conjugate with stearic | |
| | | | SfA*SfU*SfU*SfU*SfC*SfU | | | acid C6 PS | |
| WV- | UCAAGGAAGA | 618 | Mod006L001*fU*SfC*SfA*SfA*SfG*Sf | 1370 | OXSSSSSSSSOO | WV-2530 based; | DMD |
| 3027 | UGGCAUUUCU | | G*SfA*SfA*SmGmAmUmG*SfG*SfC* | | OSSSSSSSS | conjugate with DHA C6 | |
| | | | SfA*SfU*SfU*SfU*SfC*SfU | | | PS | |
| WV- | UCAAGGAAGA | 619 | fU*SfC*SfA*SfA*SfG*SfG*SfA*SfA*S | 1371 | SSSSSSSSOOOO | WV-2529 based, convert | DMD |
| 3028 | UGGCAUUUCU | | mGmAmUmGmG*SfC*SfA*SfU*SfU*S | | SSSSSSS | PO between 8th and 9th | |
| | | | fU*SfC*SfU | | | nt to PS | |
| WV- | UCAAGGAAGA | 620 | L001*fU*fC*fA*fA*fG*fG*mA*mA*m | 1372 | XXXXXXXXXX | WV-1714 based; | DMD |
| 3029 | UGGCAUUUCU | | G*mA*mU*mG*mG*mC*fA*fU*fU*fU | | XXXXXXXXXX | stereorandom; C6 PS; on | |
| | | | *fC*fU | | | support | |
| WV- | UCAAGGAAGA | 621 | Mod015L001*fU*fC*fA*fA*fG*fG*mA | 1373 | OXXXXXXXXX | WV-1714 based; | DMD |
| 3030 | UGGCAUUUCU | | *mA*mG*mA*mU*mG*mG*mC*fA*fU | | XXXXXXXXXXX | stereorandom; conjugate | |
| | | | *fU*fU*fC*fU | | | with stearic acid C6 PS | |
| WV- | UCAAGGAAGA | 622 | Mod006L001*f1J*fC*fA*fA*fG*fG*mA | 1374 | OXXXXXXXXX | WV-1714 based; | DMD |
| 3031 | UGGCAUUUCU | | *mA*mG*mA*mU*mG*mG*mC*fA*fU | | XXXXXXXXXXX | stereorandom; conjugate | |
| | | | *fU*fU*fC*fU | | | with DHA C6 PS | |
| WV- | UCAAGGAAGA | 623 | Mod020L001*fU*fC*fA*fA*fG*fG*mA | 1375 | OXXXXXXXXX | WV-1714 based; | DMD |
| 3032 | UGGCAUUUCU | | *mA*mG*mA*mU*mG*mG*mC*fA*fU | | XXXXXXXXXXX | stereorandom; conjugate | |
| | | | *fU*fU*fC*fU | | | with turbinaric acid C6 | |
| | | | | | | PS | |
| WV- | UCAAGGAAGA | 624 | Mod019L001*fU*fC*fA*fA*fG*fG*mA | 1376 | OXXXXXXXXX | WV-1714 based; | DMD |
| 3033 | UGGCAUUUCU | | *mA*mG*mA*mU*mG*mG*mC*fA*fU | | XXXXXXXXXXX | stereorandom; conjugate | |
| | | | *fU*fU*fC*fU | | | with gamma-Linolenic | |
| | | | | | | acid C6 PS | |
| WV- | UCAAGGAAGA | 625 | L001*fU*fC*fA*fA*fG*fG*fA*fA*mG | 1377 | XXXXXXXXXO | WV-2530 based; | DMD |
| 3034 | UGGCAUUUCU | | mAmUmG*fG*fC*fA*fU*fU*fU*fC*fU | | OOXXXXXXXX | stereorandom; C6 PS; on | |
| | | | | | | support | |
| WV- | UCAAGGAAGA | 626 | Mod015L001*fU*fC*fA*fA*fG*fG*fA*f | 1378 | OXXXXXXXXX | WV-2530 based; | DMD |
| 3035 | UGGCAUUUCU | | A*mGmAmUmG*fG*fC*fA*fU*fU*fU* | | OOOXXXXXXXX | stereorandom; conjugate | |
| | | | fC*fU | | | with stearic acid C6 PS | |
| WV- | UCAAGGAAGA | 627 | Mod006L001*fU*fC*fA*fA*fG*fG*fA*f | 1379 | OXXXXXXXXX | WV-2530 based; | DMD |
| 3036 | UGGCAUUUCU | | A*mGmAmUmG*fG*fC*fA*fU*fU*fU* | | OOOXXXXXXXX | stereorandom; conjugate | |
| | | | fC*fU | | | with DHA C6 PS | |
| WV- | UCAAGGAAGA | 628 | Mod020L001*fU*fC*fA*fA*fG*fG*fA*f | 1380 | OXXXXXXXXX | WV-2530 based; | DMD |
| 3037 | UGGCAUUUCU | | A*mGmAmUmG*fG*fC*fA*fU*fU*fU* | | OOOXXXXXXXX | stereorandom; conjugate | |
| | | | fC*fU | | | with turbinaric acid C6 | |
| | | | | | | PS | |
| WV- | UCAAGGAAGA | 629 | Mod019L001*fU*fC*fA*fA*fG*fG*fA*f | 1381 | OXXXXXXXXX | WV-2530 based; | DMD |
| 3038 | UGGCAUUUCU | | A*mGmAmUmG*fG*fC*fA*fU*fU*fU* | | OOOXXXXXXXX | stereorandom; conjugate | |
| | | | fC*fU | | | with gamma-Linolenic | |
| | | | | | | acid C6 PS | |
| WV- | UCAAGGAAGA | 630 | fU*fC*fA*fA*fG*fG*mAmAmGmA*m | 1382 | XXXXXXOOOX | Randomer of WV-2737; | DMD |
| 3039 | UGGCAUUUCU | | UmGmGmC*fA*fU*fU*fU*fC*fU | | OOOXXXXXX | based on WV-2438; with | exon 51 |
| | | | | | | Rp/PO in the core | |
| WV- | UCAAGGAAGA | 631 | fU*fC*fA*fA*fG*fG*mAmAmG*mA*m | 1383 | XXXXXXOOXX | Randomer of WV-2738; | DMD |
| 3040 | UGGCAUUUCU | | U*mGmGmC*fA*fU*fU*fU*fC*fU | | XOOXXXXXX | based on WV-2438; with | exon 51 |
| | | | | | | Rp/PO in the core | |
| WV- | UCAAGGAAGA | 632 | fU*fC*fA*fA*fG*fG*mAmA*mG*mA* | 1384 | XXXXXXOXXX | Randomer of WV-2739; | DMD |
| 3041 | UGGCAUUUCU | | mU*mG*mGmC*fA*fU*fU*fU*fC*fU | | XXOXXXXXX | based on WV-2438; with | exon 51 |
| | | | | | | Rp/PO in the core | |
| WV- | UCAAGGAAGA | 633 | fU*fC*fA*fA*fG*fG*mA*mA*mGmAm | 1385 | XXXXXXXXOO | Randomer of WV-2740; | DMD |
| 3042 | UGGCAUUUCU | | UmG*mG*mC*fA*fU*fU*fU*fC*fU | | OXXXXXXXX | based on WV-2438; with | exon 51 |
| | | | | | | Rp/PO in the core | |
| WV- | UCAAGGAAGA | 634 | fU*fC*fA*fA*fG*fG*mA*mAmGmAm | 1386 | XXXXXXXOOO | Randomer of WV-2741; | DMD |
| 3043 | UGGCAUUUCU | | UmGmG*mC*fA*fU*fU*fU*fC*fU | | OOXXXXXXX | based on WV-2438; with | exon 51 |
| | | | | | | Rp/PO in the core | |
| WV- | UCAAGGAAGA | 635 | fU*fC*fA*fA*fG*fG*mA*mA*mGmAm | 1387 | XXXXXXXXOO | Randomer of WV-2742; | DMD |
| 3044 | UGGCAUUUCU | | UmG*mG*mC*fA*fU*fU*fU*fC*fU | | OXXXXXXXX | based on WV-2438; with | exon 51 |
| | | | | | | Sp/PO in the core | |
| WV- | UCAAGGAAGA | 636 | fU*fC*fA*fA*fG*fG*mA*mAmGmAm | 1388 | XXXXXXXOOO | Randomer of WV-2743; | DMD |
| 3045 | UGGCAUUUCU | | UmGmG*mC*fA*fU*fU*fU*fC*fU | | OOXXXXXXX | based on WV-2438; with | exon 51 |
| | | | | | | Sp/PO in the core | |
| WV- | UCAAGGAAGA | 637 | fU*fC*fA*fA*fG*fG*mAmAmGmAfU* | 1389 | XXXXXXOOOO | Randomer of WV-2745; | DMD |
| 3046 | UGGCAUUUCU | | mGmG*fC*fA*fU*fU*fU*fC*fU | | XOXXXXXXX | based on WV-2444; | exon 51 |
| | | | | | | Sp/PO in the core; with | |
| | | | | | | additional fU fC in the | |
| | | | | | | core | |
| WV- | UCAAGGAAGA | 638 | fU*fC*fA*fA*fG*fG*mA*mA*mG*mA | 1390 | XXXXXXXXXX | Randomer of WV-2746; | DMD |
| 3047 | UGGCAUUUCU | | *fU*mG*mG*fC*fA*fU*fU*fU*fC*fU | | XXXXXXXXX | based on WV-2444; | exon 51 |
| | | | | | | Sp/Rp in the core; with | |
| | | | | | | additional fU fC in the | |
| | | | | | | core | |
| WV- | UCAAGGAAGA | 639 | fU*fC*fA*fA*mG*mG*fAfAmGmAfU* | 1391 | XXXXXXOOOO | Randomer of WV-2747; | DMD |
| 3048 | UGGCAUUUCU | | mGmG*fC*fA*fU*fU*fU*fC*fU | | XOXXXXXXX | based on WV-2444; | exon 51 |
| | | | | | | Sp/PO in the core; with | |
| | | | | | | mGmG on left wing, | |
| | | | | | | with additional fA fA fU | |
| | | | | | | fC in the core | |
| WV- | UCAAGGAAGA | 640 | fU*fC*fA*fA*mG*mG*fA*fA*mG*mA | 1392 | XXXXXXXXXX | Randomer of WV-2748; | DMD |
| 3049 | UGGCAUUUCU | | *fU*mG*mG*fC*fA*fU*fU*fU*fC*fU | | XXXXXXXXX | based on WV-2444; | exon 51 |
| | | | | | | Sp/Rp in the core; with | |
| | | | | | | mGmG on left wing, | |
| | | | | | | with additional fA fA fU | |
| | | | | | | fC in the core | |
| WV- | UCAAGGAAGA | 641 | fU*fC*fA*fA*fG*fG*mA*mA*mG*mA | 1393 | XXXXXXXXXX | All PS version of the | DMD |
| 3050 | UGGCAUUUCU | | *fU*mG*mG*fC*fA*fU*fU*fU*fC*fU | | XXXXXXXXX | randomer of WV- | exon 51 |
| | | | | | | 2745/2746; based on | |
| | | | | | | WV-2444; with | |
| | | | | | | additional fU fC in the | |
| | | | | | | core | |
| WV- | UCAAGGAAGA | 642 | fU*fC*fA*fA*mG*mG*fA*fA*mG*mA | 1394 | XXXXXXXXXX | All PS version of the | DMD |
| 3051 | UGGCAUUUCU | | *fU*mG*mG*fC*fA*fU*fU*fU*fC*fU | | XXXXXXXXX | randomer of WV- | exon 51 |
| | | | | | | 2747/2748; based on | |
| | | | | | | WV-2444; Sp/PO in the | |
| | | | | | | core; with mGmG on | |
| | | | | | | left wing, with | |
| | | | | | | additional fA fA fU fC | |
| | | | | | | in the core | |
| WV- | UCAAGGAAGA | 643 | fU*fC*fA*fA*mG*mG*fA*fA*mGmAm | 1395 | XXXXXXXXOO | Based on WV-2530; | DMD |
| 3052 | UGGCAUUUCU | | UmG*mG*fC*fA*fU*fU*fU*fC*fU | | OXXXXXXXX | replace all 2′F G with | exon 51 |
| | | | | | | 2′Ome G | |
| WV- | UCAAGGAAGA | 644 | fU*fC*fA*fA*mG*mG*mA*mA*mGmA | 1396 | XXXXXXXXOO | Based on WV-2107; | DMD |
| 3053 | UGGCAUUUCU | | fUmG*mG*fC*fA*fU*fU*fU*fC*fU | | OXXXXXXXX | four 2′-F on the 5′; seven | exon 51 |
| | | | | | | 2′-F on the 3′; 2′F U in | |
| | | | | | | the center | |
| WV- | UCAAGGAAGA | 645 | fU*fC*fA*fA*mG*mG*fA*fA*mG*mA | 1397 | XXXXXXXXXX | All PS; based on WV- | DMD |
| 3054 | UGGCAUUUCU | | *mU*mG*mG*fC*fA*fU*fU*fU*fC*fU | | XXXXXXXXX | 2530/2529; replace all | exon 51 |
| | | | | | | 2′F G with 2′Ome G | |
| WV- | UCAAGGAAGA | 646 | fU*fC*fA*fA*mG*mG*mA*mA*mG*m | 1398 | XXXXXXXXXX | All PS; based on WV- | DMD |
| 3055 | UGGCAUUUCU | | A*fU*mG*mG*fC*fA*fU*fU*fU*fC*fU | | XXXXXXXXX | 2107; four 2′-F on the 5′; | exon 51 |
| | | | | | | seven 2′-F on the 3′; 2′F | |
| | | | | | | U in the center | |
| WV- | UCAAGGAAGA | 647 | fU*fC*fA*fA*mG*mG*fAfAmGmA*fU | 1399 | XXXXXXOOOX | Based on WV-2747; | DMD |
| 3056 | UGGCAUUUCU | | *mGmG*fC*fA*fU*fU*fU*fC*fU | | XOXXXXXXX | with additional PS in the | exon 51 |
| | | | | | | center between A and U | |
| WV- | UCAAGGAAGA | 648 | fU*fC*fA*fA*mG*mG*fA*fA*mG*mA | 1400 | XXXXXXXXXX | All PS version; based on | DMD |
| 3057 | UGGCAUUUCU | | *fU*mG*mG*fC*fA*fU*fU*fU*fC*fU | | XXXXXXXXX | WV-2747; with | exon 51 |
| | | | | | | additional PS in the | |
| | | | | | | center between A and U | |
| WV- | UCAAGGAAGA | 649 | fU*fC*fA*fA*mG*mG*fA*fA*mG*fA*f | 1401 | XXXXXXXXXX | Based on WV-1716; | DMD |
| 3058 | UGGCAUUUCU | | U*mG*mG*fC*fA*fU*fU*fU*fC*fU | | XXXXXXXXX | with all mC converted to | exon 51 |
| | | | | | | fC | |
| WV- | UCAAGGAAGA | 650 | fU*fC*fA*fA*mG*mG*fA*fA*mGmAm | 1402 | XXXXXXXXOO | Randomers of based on | DMD |
| 3059 | UGGCAUUUCU | | UmGmG*fC*fA*fU*fU*fU*fC*fU | | OOXXXXXXX | WV-2529; with all G as | exon 51 |
| | | | | | | mG; with additional PS | |
| | | | | | | between A and G | |
| WV- | UCAAGGAAGA | 651 | fU*fC*fA*fA*mG*mG*fA*fA*mGmAf | 1403 | XXXXXXXXOO | Randomer; Sp/PO in the | DMD |
| 3060 | UGGCAUUUCU | | U*mGmG*fC*fA*fU*fU*fU*fC*fU | | XOXXXXXXX | core; with mGmG on | exon 51 |
| | | | | | | left wing, with | |
| | | | | | | additional fA fA fU fC | |
| | | | | | | in the core | |
| WV- | UCAAGGAAGA | 652 | fU*fC*fA*fA*mG*mG*mA*mA*mGmA | 1404 | XXXXXXXXOO | Based on WV-2107; | DMD |
| 3061 | UGGCAUUUCU | | fU*mGmG*fC*fA*fU*fU*fU*fC*fU | | XOXXXXXXX | four 2′-F on the 5′; seven | exon 51 |
| | | | | | | 2′-F on the 3′; 2′F U in | |
| | | | | | | the center | |
| WV- | UCAAGGAAGA | 653 | fU*SfC*SfA*SfA*SfG*SfG*SmAmAmG | 1405 | SSSSSSOOOODO | WV-2438 based, with | Exon 51 |
| 3070 | UGGCAUUUCU | | mAmU:mGmGmC*SfA*SfU*SfU*SfU* | | OSSSSSS | PS2 after nucleotide 11 | |
| | | | SfC*SfU | | | | |
| WV- | UCAAGGAAGA | 654 | fU*SfC*SfA*SfA*SfG*SfG*SmAmA:m | 1406 | SSSSSSODODOD | WV-2438 based, with | Exon 51 |
| 3071 | UGGCAUUUCU | | GmA:mUmG:mGmC*SfA*SfU*SfU*SfU | | OSSSSSS | PS2 after nucleotide 8, | |
| | | | *SfC*SfU | | | 10, 12 | |
| WV- | UCAAGGAAGA | 655 | fU*SfC*SfA*SfA*SfG*SfG*SmA:mAm | 1407 | SSSSSSDODODO | WV-2438 based, with | Exon 51 |
| 3072 | UGGCAUUUCU | | G:mAmU:mGmG:mC*SfA*SfU*SfU*Sf | | DSSSSSS | PS2 after nucleotide 7, | |
| | | | U*SfC*SfU | | | 9, 11, 13 | |
| WV- | UCAAGGAAGA | 656 | fU*SfC*SfA*SfA*SfG*SfG*SmA:mAm | 1408 | SSSSSSDOOODO | WV-2438 based, with | Exon 51 |
| 3073 | UGGCAUUUCU | | GmAmU:mGmG:mC*SfA*SfU*SfU*SfU | | DSSSSSS | PS2 after nucleotide 7, | |
| | | | *SfC*SfU | | | 10, 13 | |
| WV- | UCAAGGAAGA | 657 | fU*SfC*SfA*SfA*fGSG:mAmAmGmA | 1409 | SSSXDDOOOOD | WV-2438 based, with | Exon 51 |
| 3074 | UGGCAUUUCU | | mU:mGmGmC*SfA*SfU*SfU*SfU*SfC | | OOSSSSSS | PS2 after nucleotide 11; | |
| | | | *SfU | | | two SfG * on 5′ wing | |
| | | | | | | converted to fG-PS2 | |
| WV- | UCAAGGAAGA | 658 | fU*SfC*SfA*SfA*mG:mG:mAmAmGm | 1410 | SSSXDDOOOOD | WV-2438 based, with | Exon 51 |
| 3075 | UGGCAUUUCU | | AmU:mGmGmC*SfA*SfU*SfU*SfU*Sf | | OOSSSSSS | PS2 after nucleotide 11; | |
| | | | C*SfU | | | two SfG * on 5′ wing | |
| | | | | | | converted to mG-PS2 | |
| WV- | UCAAGGAAGA | 659 | fU*SfC*SfA*SfA*SfG*SfG*SfA*SmAm | 1411 | SSSSSSSOOODO | WV-2749 based, with | Exon 51 |
| 3076 | UGGCAUUUCU | | GmAmU:mGmG*SfC*SfA*SfU*SfU*Sf | | SSSSSSS | PS2 after nucleotide 11 | |
| | | | U*SfC*SfU | | | | |
| WV- | UCAAGGAAGA | 660 | fU*SfC*SfA*SfA*fG:fG:fA*SmAmGmA | 1412 | SSSXDDSOOOD | WV-2749 based, with | Exon 51 |
| 3077 | UGGCAUUUCU | | mU:mGmG*SfC*SfA*SfU*SfU*SfU*Sf | | OSSSSSSS | PS2 after nucleotide 11; | |
| | | | C*SfU | | | two SfG * on 5′ wing | |
| | | | | | | converted to fG-PS2 | |
| WV- | UCAAGGAAGA | 661 | fU*SfC*SfA*SfA*mG:mG:fA*SmAmG | 1413 | SSSXDDSOOOD | WV-2749 based, with | Exon 51 |
| 3078 | UGGCAUUUCU | | mAmU:mGmG*SfC*SfA*SfU*SfU*SfU | | OSSSSSSS | PS2 after nucleotide 11; | |
| | | | *SfC*SfU | | | two SfG * on 5′ wing | |
| | | | | | | converted to mG-PS2 | |
| WV- | UCAAGGAAGA | 662 | fU*SfC*SfA*SfA*SfG*SfG*SfA*SfA*S | 1414 | SSSSSSSSOODSS | WV-2530 based, with | Exon 51 |
| 3079 | UGGCAUUUCU | | mGmAmU:mG*SfG*SfC*SfA*SfU*SfU | | SSSSSS | PS2 after nucleotide 11 | |
| | | | *SfU*SfC*SfU | | | | |
| WV- | UCAAGGAAGA | 663 | fU*SfC*SfA*SfA*SfG*SfG*SfA*SfA*S | 1415 | SSSSSSSSDDDSS | WV-2530 based, with | Exon 51 |
| 3080 | UGGCAUUUCU | | mG:mA:mU:mG*SfG*SfC*SfA*SfU*Sf | | SSSSSS | PS2 after nucleotide 9, | |
| | | | U*SfU*SfC*SfU | | | 10, 11 | |
| WV- | UCAAGGAAGA | 664 | fU*SfC*SfA*SfA*SfG*SfG*SfA*SfA*S | 1416 | SSSSSSSSDODSS | WV-2530 based, with | Exon 51 |
| 3081 | UGGCAUUUCU | | mG:mAmU:mG*SfG*SfC*SfA*SfU*SfU | | SSSSSS | PS2 after nucleotide 9, | |
| | | | *SfU*SfC*SfU | | | 11 | |
| WV- | UCAAGGAAGA | 665 | fU*SfC*SfA*SfA*fG:fG:fA*SfA*SmGm | 1417 | SSSXDDSSOODS | WV-2530 based, with | Exon 51 |
| 3082 | UGGCAUUUCU | | AmU:mG*SfG*SfC*SfA*SfU*SfU*SfU* | | SSSSSSS | PS2 after nucleotide 11; | |
| | | | SfC*SfU | | | two SfG * on 5′ wing | |
| | | | | | | converted to fG-PS2 | |
| WV- | UCAAGGAAGA | 666 | fU*SfC*SfA*SfA*mG:mG:fA*SfA*SmG | 1418 | SSSXDDSSOODS | WV-2530 based, with | Exon 51 |
| 3083 | UGGCAUUUCU | | mAmU:mG*SfG*SfC*SfA*SfU*SfU*Sf | | SSSSSSS | PS2 after nucleotide 11; | |
| | | | U*SfC*SfU | | | two SfG * on 5′ wing | |
| | | | | | | converted to mG-PS2 | |
| WV- | UCAAGGAAGA | 667 | Mod015L001mU*mC*mA*mA*mG*mG | 1419 | OOXXXXXXXX | WV942 with C6 PO and | Exon 51 |
| 3084 | UGGCAUUUCU | | *mA*mA*mG*mA*mU*mG*mG*mC* | | XXXXXXXXXXX | Stearic | |
| | | | mA*mU*mU*mU*mC*mU | | | | |
| WV- | UCAAGGAAGA | 668 | Mod019L001mU*mC*mA*mA*mG*mG | 1420 | OOXXXXXXXX | WV942 with C6 PO and | Exon 51 |
| 3085 | UGGCAUUUCU | | *mA*mA*mG*mA*mU*mG*mG*mC* | | XXXXXXXXXXX | gamma-Linolenic | |
| | | | mA*mU*mU*mU*mC*mU | | | | |
| WV- | UCAAGGAAGA | 669 | Mod020L001mU*mC*mA*mA*mG*mG | 1421 | OOXXXXXXXX | WV942 with C6 PO and | Exon 51 |
| 3086 | UGGCAUUUCU | | *mA*mA*mG*mA*mU*mG*mG*mC* | | XXXXXXXXXXX | Turbinaric | |
| | | | mA*mU*mU*mU*mC*mU | | | | |
| WV- | UCAAGGAAGA | 670 | Mod015L001:mU*mC*mA*mA*mG*m | 1422 | ODXXXXXXXX | WV942 with C6 PS2 | Exon 51 |
| 3087 | UGGCAUUUCU | | G*mA*mA*mG*mA*mU*mG*mG*mC* | | XXXXXXXXXXX | and Stearic | |
| | | | mA*mU*mU*mU*mC*mU | | | | |
| WV- | UCAAGGAAGA | 671 | Mod019L001:mU*mC*mA*mA*mG*m | 1423 | ODXXXXXXXX | WV942 with C6 PS2 | Exon 51 |
| 3088 | UGGCAUUUCU | | G*mA*mA*mG*mA*mU*mG*mG*mC* | | XXXXXXXXXXX | and gamma-Linolenic | |
| | | | mA*mU*mU*mU*mC*mU | | | | |
| WV- | UCAAGGAAGA | 672 | Mod020L001:mU*mC*mA*mA*mG*m | 1424 | ODXXXXXXXX | WV942 with C6 PS2 | Exon 51 |
| 3089 | UGGCAUUUCU | | G*mA*mA*mG*mA*mU*mG*mG*mC* | | XXXXXXXXXXX | and Turbinaric | |
| | | | mA*mU*mU*mU*mC*mU | | | | |
| WV- | UCAAGGAAGA | 673 | fU*SfC*SfA*SfA*SfG:fG:mAmAmGmA | 1425 | SSSSDDOOOOD | Variant of WV-3074. | Exon 51 |
| 3113 | UGGCAUUUCU | | mU:mGmGmC*SfA*SfU*SfU*SfU*SfC | | OOSSSSSS | There was a randomer | |
| | | | *SfU | | | PS in WV-3074 | |
| WV- | UCAAGGAAGA | 674 | fU*SfC*SfA*SfA*SmG:mG:mAmAmG | 1426 | SSSSDDOOOOD | Variant of WV-3075. | Exon 51 |
| 3114 | UGGCAUUUCU | | mAmU:mGmGmC*SfA*SfU*SfU*SfU* | | OOSSSSSS | There was a randomer | |
| | | | SfC*SfU | | | PS in WV-3075 | |
| WV- | UCAAGGAAGA | 675 | fU*SfC*SfA*SfA*SfG:fG:fA*SmAmGm | 1427 | SSSSDDSOOOD | Variant of WV-3077. | Exon 51 |
| 3115 | UGGCAUUUCU | | AmU:mGmG*SfC*SfA*SfU*SfU*SfU*S | | OSSSSSSS | There was a randomer | |
| | | | fC*SfU | | | PS in WV-3077 | |
| WV- | UCAAGGAAGA | 676 | fU*SfC*SfA*SfA*SmG:mG:fA*SmAmG | 1428 | SSSSDDSOOOD | Variant of WV-3078. | Exon 51 |
| 3116 | UGGCAUUUCU | | mAmU:mGmG*SfC*SfA*SfU*SfU*SfU | | OSSSSSSS | There was a randomer | |
| | | | *SfC*SfU | | | PS in WV-3078 | |
| WV- | UCAAGGAAGA | 677 | fU*SfC*SfA*SfA*SfG:fG:fA*SfA*SmG | 1429 | SSSSDDSSOODS | Variant of WV-3082. | Exon 51 |
| 3117 | UGGCAUUUCU | | mAmU:mG*SfG*SfC*SfA*SfU*SfU*Sf | | SSSSSSS | There was a randomer | |
| | | | U*SfC*SfU | | | PS in WV-3082 | |
| WV- | UCAAGGAAGA | 678 | fU*SfC*SfA*SfA*SmG:mG:fA*SfA*Sm | 1430 | SSSSDDSSOODS | Variant of WV-3083. | Exon 51 |
| 3118 | UGGCAUUUCU | | GmAmU:mG*SfG*SfC*SfA*SfU*SfU*S | | SSSSSSS | There was a randomer | |
| | | | fU*SfC*SfU | | | PS in WV-3083 | |
| WV- | UCAAGGAAGA | 679 | fU*SfC*SfA*SfA*SfG*SfG*SfA*SfA*Sf | 1431 | SSSSSSSSSOOSS | 9F-3OMe-8F 9Sp-2PO- | Exon 51 |
| 3120 | UGGCAUUUCU | | G*SmAmUmG*SfG*SfC*SfA*SfU*SfU | | SSSSSS | 8Sp | |
| | | | *SfU*SfC*SfU | | | | |
| WV- | UCAAGGAAGA | 680 | fU*fC*fA*fA*fG*fG*fA*fA*fG*mAmU | 1432 | XXXXXXXXXO | 9F-3OMe-8F 9PS-2PO- | Exon 51 |
| 3121 | UGGCAUUUCU | | mG*fG*fC*fA*fU*fU*fU*fC*fU | | OXXXXXXXX | 8PS, randomer version | |
| | | | | | | of WV-3120 | |
| WV- | UCAAGGAAGA | 681 | fU*SfC*SfA*SfA*SfG*SfG*SmAfA*Sm | 1433 | SSSSSSOSOSOS | WV-2438 modifed | DMD |
| 3152 | UGGCAUUUCU | | GfA*SmUfG*SmGfC*SfA*SfU*SfU*Sf | | OSSSSSS | | |
| | | | U*SfC*SfU | | | | |
| WV- | UCAAGGAAGA | 682 | fU*SfC*SfA*SfA*SfG*SfG*SfA*SfA*S | 1434 | SSSSSSSSOSOSS | WV-2529 modified | DMD |
| 3153 | UGGCAUUUCU | | mGfA*SmUfG*SmG*SfC*SfA*SfU*SfU | | SSSSSS | | |
| | | | *SfU*SfC*SfU | | | | |
| WV- | UCAAGGAAGA | 683 | L001mU*mC*mA*mA*mG*mG*mA*m | 1435 | OXXXXXXXXX | WV942 with C6 PO | Exon 51 |
| 3357 | UGGCAUUUCU | | A*mG*mA*mU*mG*mG*mC*mA*mU* | | XXXXXXXXXX | linker | |
| | | | mU*mU*mC*mU | | | | |
| WV- | UCAAGGAAGA | 684 | L001fU*SfC*SfA*SfA*SfG*SfG*SfA*Sf | 1436 | OSSSSSSSSSOSS | WV2531 with C6 PO | Exon 51 |
| 3358 | UGGCAUUUCU | | A*SfG*SmAmU*SfG*SfG*SfC*SfA*Sf | | SSSSSSS | linker | |
| | | | U*SfU*SfU*SfC*SfU | | | | |
| WV- | UCAAGGAAGA | 685 | Mod013L001mU*mC*mA *mA*mG*mG | 1437 | OOXXXXXXXX | WV942 with C6 amine | Exon 51 |
| 3359 | UGGCAUUUCU | | *mA*mA*mG*mA*mU*mG*mG*mC* | | XXXXXXXXXXX | PO linker, Lauric acid | |
| | | | mA*mU*mU*mU*mC*mU | | | | |
| WV- | UCAAGGAAGA | 686 | Mod013L001fU*SfC*SfA*SfA*SfG*SfG | 1438 | OOSSSSSSSSSOS | WV2531 with C6 amine | Exon 51 |
| 3360 | UGGCAUUUCU | | *SfA*SfA*SfG*SmAmU*SfG*SfG*SfC* | | SSSSSSSS | PO linker, Lauric acid | |
| | | | SfA*SfU*SfU*SfU*SfC*SfU | | | | |
| WV- | UCAAGGAAGA | 687 | Mod014L001fU*SfC*SfA*SfA*SfG*SfG | 1439 | OOSSSSSSSSSOS | WV2531 with C6 amine | Exon 51 |
| 3361 | UGGCAUUUCU | | *SfA*SfA*SfG*SmAmU*SfG*SfG*SfC* | | SSSSSSSS | PO linker, Myristic acid | |
| | | | SfA*SfU*SfU*SfU*SfC*SfU | | | | |
| WV- | UCAAGGAAGA | 688 | Mod005L001fU*SfC*SfA*SfA*SfG*SfG | 1440 | OOSSSSSSSSSOS | WV2531 with C6 amine | Exon 51 |
| 3362 | UGGCAUUUCU | | *SfA*SfA*SfG*SmAmU*SfG*SfG*SfC* | | SSSSSSSS | PO linker, Palmitic acid | |
| | | | SfA*SfU*SfU*SfU*SfC*SfU | | | | |
| WV- | UCAAGGAAGA | 689 | Mod015L001fU*SfC*SfA*SfA*SfG*SfG | 1441 | OOSSSSSSSSSOS | WV2531 with C6 amine | Exon 51 |
| 3363 | UGGCAUUUCU | | *SfA*SfA*SfG*SmAmU*SfG*SfG*SfC* | | SSSSSSSS | PO linker, Stearic acid | |
| | | | SfA*SfU*SfU*SfU*SfC*SfU | | | | |
| WV- | UCAAGGAAGA | 690 | Mod020L001fU*SfC*SfA*SfA*SfG*SfG | 1442 | OOSSSSSSSSSOS | WV2531 with C6 amine | Exon 51 |
| 3364 | UGGCAUUUCU | | *SfA*SfA*SfG*SmAmU*SfG*SfG*SfC* | | SSSSSSSS | PO linker, Turbinaric | |
| | | | SfA*SfU*SfU*SfU*SfC*SfU | | | acid | |
| WV- | UCAAGGAAGA | 691 | Mod027L001fU*SfC*SfA*SfA*SfG*SfG | 1443 | OSSSSSSSSSOSS | WV2531 with C6 amine | Exon 51 |
| 3365 | UGGCAUUUCU | | *SfA*SfA*SfG*SmAmU*SfG*SfG*SfC* | | SSSSSSS | PO linker, | |
| | | | SfA*SfU*SfU*SfU*SfC*SfU | | | MonoSulfonamide | |
| WV- | UCAAGGAAGA | 692 | Mod029L001fU*SfC*SfA*SfA*SfG*SfG | 1444 | OSSSSSSSSSOSS | WV2531 with C6 amine | Exon 51 |
| 3366 | UGGCAUUUCU | | *SfA*SfA*SfG*SmAmU*SfG*SfG*SfC* | | SSSSSSS | PO linker, | |
| | | | SfA*SfU*SfU*SfU*SfC*SfU | | | TriSulfonamide | |
| WV- | UCAAGGAAGA | 693 | fU*SfC*SfA*SfA*SfG*SfGfA*SmAfG* | 1445 | SSSSSOSOSOSO | modifying WV-3152, | Exon 51 |
| 3463 | UGGCAUUUCU | | SmAfU*SmGfGfC*SfA*SfU*SfU*SfU* | | OSSSSSS | 2′f-U and Sp in the | |
| | | | SfC*SfU | | | middle | |
| WV- | UCAAGGAAGA | 694 | fU*SfC*SfA*SfA*SfG*SfG*SfA*SfAfG | 1446 | SSSSSSSOSOSSS | modifying WV-3153, | Exon 51 |
| 3464 | UGGCAUUUCU | | *SmAfU*SmG*SmG*SfC*SfA*SfU*SfU | | SSSSSS | 2′f-U and Sp in the | |
| | | | *SfU*SfC*SfU | | | middle | |
| WV- | UCAAGGAAGA | 695 | fU*SfC*SfA*SfA*SfG*SfG*SfA*SfA*Sf | 1447 | SSSSSSSSSOSSS | modifying WV-2531, | Exon 51 |
| 3465 | UGGCAUUUCU | | G*SmAfU*SmG*SfG*SfC*SfA*SfU*Sf | | SSSSSS | 2′f-U and Sp in the | |
| | | | U*SfU*SfC*SfU | | | middle | |
| WV- | UCAAGGAAGA | 696 | fU*SfC*SfA*SfA*SfG*SfG*SfA*SfA*S | 1448 | SSSSSSSSOOSOS | modifying WV-3028, | Exon 51 |
| 3466 | UGGCAUUUCU | | mGmAfU*SmGmG*SfC*SfA*SfU*SfU* | | SSSSSS | 2′f-U and Sp in the | |
| | | | SfU*SfC*SfU | | | middle | |
| WV- | UCAAGGAAGA | 697 | fU*SfC*SfA*SfA*SfG*SfG*SfA*SfA*Sf | 1449 | SSSSSSSSSOSOS | modifying WV-3120, | Exon 51 |
| 3467 | UGGCAUUUCU | | G*SmAfU*SmGfG*SfC*SfA*SfU*SfU* | | SSSSSS | 2′f-U and Sp in the | |
| | | | SfU*SfC*SfU | | | middle | |
| WV- | UCAAGGAAGA | 698 | fU*SfC*SfA*SfA*SfG*SfG*mAmAmG | 1450 | SSSSSXOOOOSO | modifying WV-3046, | Exon 51 |
| 3468 | UGGCAUUUCU | | mAfU*SmGmG*SfC*SfA*SfU*SfU*SfU | | SSSSSSS | 2′f-U and Sp in the | |
| | | | *SfC*SfU | | | middle | |
| WV- | UCAAGGAAGA | 699 | fU*SfC*SfA*SfA*SfG*SfG*SmA*SmA* | 1451 | SSSSSSSSSSSSSS | modifying WV-3047, | Exon 51 |
| 3469 | UGGCAUUUCU | | SmG*SmA*SfU*SmG*SmG*SfC*SfA*S | | SSSSS | 2′f-U and Sp in the | |
| | | | fU*SfU*SfU*SfC*SfU | | | middle | |
| WV- | UCAAGGAAGA | 700 | fU*SfC*SfA*SfA*SfG*SfG*SmAfA*Sm | 1452 | SSSSSSOSOSOS | 2′F on the middle U; | DMD |
| 3470 | UGGCAUUUCU | | GfA*SfUfG*SmGfC*SfA*SfU*SfU*SfU | | OSSSSSS | modified on WV-3152 | |
| | | | *SfC*SfU | | | | |
| WV- | UCAAGGAAGA | 701 | fU*SfC*SfA*SfA*SfG*SfG*SmAfA*Sm | 1453 | SSSSSSOSOSOO | 2′F on the middle U; | DMD |
| 3471 | UGGCAUUUCU | | GfA*SfUmGmGfC*SfA*SfU*SfU*SfU* | | OSSSSSS | modified on WV-3152 | |
| | | | SfC*SfU | | | | |
| WV- | UCAAGGAAGA | 702 | fU*SfC*SfA*SfA*SfG*SfG*SmAfA*Sm | 1454 | SSSSSSOSOSSO | 2′F on the middle U; | DMD |
| 3472 | UGGCAUUUCU | | GfA*SfU*SmGmGfC*SfA*SfU*SfU*Sf | | OSSSSSS | modified on WV-3152 | |
| | | | U*SfC*SfU | | | | |
| WV- | UCAAGGAAGA | 703 | fU*SfC*SfA*SfA*SfG*SfG*SmAfA*Sm | 1455 | SSSSSSOSOSSO | 2′F on the middle U; | DMD |
| 3473 | UGGCAUUUCU | | GmA*SfU*SmGmGfC*SfA*SfU*SfU*Sf | | OSSSSSS | modified on WV-3152 | |
| | | | U*SfC*SfU | | | | |
| WV- | UCAAGGAAGA | 704 | fU*SfC*SfA*SfA*SfG*SfG*SmAfA*Sm | 1456 | SSSSSSOSOOSO | modifed on WV-3472; | Exon 51 |
| 3506 | UGGCAUUUCU | | GfAfU*SmGmGfC*SfA*SfU*SfU*SfU* | | OSSSSSS | except for PO linker | |
| | | | SfC*SfU | | | between fA (10th nt) and | |
| | | | | | | fU (11th nt) | |
| WV- | UCAAGGAAGA | 705 | fU*SfC*SfA*SfA*SfG*SfG*SmAfA*Sm | 1457 | SSSSSSOSOOSO | modifed on WV-3473; | Exon 51 |
| 3507 | UGGCAUUUCU | | GmAfU*SmGmGfC*SfA*SfU*SfU*SfU | | OSSSSSS | except for PO linker | |
| | | | *SfC*SfU | | | between mA (10th nt) | |
| | | | | | | and fU (11th nt) | |
| WV- | UCAAGGAAGA | 706 | fU*SfC*SfA*SfA*SfG*SfG*SmAfA*Sm | 1458 | SSSSSSOSOSSO | modifed on WV-3472; | Exon 51 |
| 3508 | UGGCAUUUCU | | GfA*SfU*SmGmGfC*SfAfU*SfU*SfU* | | OSOSSSS | except for PO linker | |
| | | | SfC*SfU | | | between fA (15th nt) and | |
| | | | | | | fU (16th nt) | |
| WV- | UCAAGGAAGA | 707 | fU*SfC*SfA*SfA*SfG*SfG*SmAfA*Sm | 1459 | SSSSSSOSOSSO | modifed on WV-3473; | Exon 51 |
| 3509 | UGGCAUUUCU | | GmA*SfU*SmGmGfC*SfAfU*SfU*SfU | | OSOSSSS | except for PO linker | |
| | | | *SfC*SfU | | | between fA (15th nt) and | |
| | | | | | | fU (16th nt) | |
| WV- | UCAAGGAAGA | 708 | fU*SfC*SfA*SfA*SfG*SfG*SmAfA*Sm | 1460 | SSSSSSOSOOSO | modifed on WV-3472; | Exon 51 |
| 3510 | UGGCAUUUCU | | GfAfU*SmGmGfC*SmA*SfU*SfU*SfU | | OSSSSSS | except for mA on 15th nt | |
| | | | *SfC*SfU | | | | |
| WV- | UCAAGGAAGA | 709 | fU*SfC*SfA*SfA*SfG*SfG*SmAfA*Sm | 1461 | SSSSSSOSOOSO | modifed on WV-3473; | Exon 51 |
| 3511 | UGGCAUUUCU | | GmAfU*SmGmGfC*SmA*SfU*SfU*Sf | | OSSSSSS | except for mA on 15th nt | |
| | | | U*SfC*SfU | | | | |
| WV- | UCAAGGAAGA | 710 | fU*SfC*SfA*SfA*SfG*SfG*SmAfA*Sm | 1462 | SSSSSSOSOOSO | modifed on WV-3472; | Exon 51 |
| 3512 | UGGCAUUUCU | | GfAfU*SmGmGfC*SmAfU*SfU*SfU*Sf | | OSOSSSS | except for PO linker | |
| | | | C*SfU | | | between fA (10th nt) and | |
| | | | | | | fU (11th nt); mA on 15th | |
| | | | | | | nt, and PO between mA | |
| | | | | | | (15th nt) and fU (16th | |
| | | | | | | nt) | |
| WV- | UCAAGGAAGA | 711 | fU*SfC*SfA*SfA*SfG*SfG*SmAfA*Sm | 1463 | SSSSSSOSOOSO | modifed on WV-3472; | Exon 51 |
| 3513 | UGGCAUUUCU | | GmAfU*SmGmGfC*SmAfU*SfU*SfU* | | OSOSSSS | except for PO linker | |
| | | | SfC*SfU | | | between mA (10th nt) | |
| | | | | | | and fU (11th nt); mA on | |
| | | | | | | 15th nt, and PO between | |
| | | | | | | mA (15th nt) and fU | |
| | | | | | | (16th nt) | |
| WV- | UCAAGGAAGA | 712 | fU*SfC*SfA*SfA*SfG*SfG*SmAfA*Sm | 1464 | SSSSSSOSOOSO | modifed on WV-3472; | Exon 51 |
| 3514 | UGGCAUUUCU | | GfAfU*SmGmGfC*SfAfU*SfU*SfU*Sf | | OSOSSSS | except for PO linker | |
| | | | C*SfU | | | between fA (10th nt) and | |
| | | | | | | fU (11th nt); PO | |
| | | | | | | between fA (15th nt) and | |
| | | | | | | fU (16th nt) | |
| WV- | UCAAGGAAGA | 713 | fU*SfC*SfA*SfA*SfG*SfG*SmAfA*Sm | 1465 | SSSSSSOSOOSO | modifed on WV-3472; | Exon 51 |
| 3515 | UGGCAUUUCU | | GmAfU*SmGmGfC*SfAfU*SfU*SfU*Sf | | OSOSSSS | except for PO linker | |
| | | | C*SfU | | | between mA (10th nt) | |
| | | | | | | and fU (11th nt); PO | |
| | | | | | | between fA (15th nt) and | |
| | | | | | | fU (16th nt) | |
| WV- | UCAAGGAAGA | 714 | fU*fC*fA*fA*fG*fG*mAfA*mGfA*mU | 1466 | XXXXXXOXOX | randomer version of | Exon 51 |
| 3516 | UGGCAUUUCU | | fG*mGfC*fA*fU*fU*fU*fC*fU | | OXOXXXXXX | WV-3152 | |
| WV- | UCAAGGAAGA | 715 | Mod030fU*fC*fA*fA*fG*fG*mAfA*m | 1467 | OXXXXXXOXO | with PO linker, Lauric | Exon 51 |
| 3517 | UGGCAUUUCU | | GfA*mUfG*mGfC*fA*fU*fU*fU*fC*fU | | XOXOXXXXXX | | |
| WV- | UCAAGGAAGA | 716 | Mod031fU*fC*fA*fA*fG*fG*mAfA*m | 1468 | OXXXXXXOXO | with PO linker, Myristic | Exon 51 |
| 3518 | UGGCAUUUCU | | GfA*mUfG*mGfC*fA*fU*fU*fU*fC*fU | | XOXOXXXXXX | | |
| WV- | UCAAGGAAGA | 717 | Mod032fU*fC*fA*fA*fG*fG*mAfA*m | 1469 | OXXXXXXOXO | with PO linker, Palmitic | Exon 51 |
| 3519 | UGGCAUUUCU | | GfA*mUfG*mGfC*fA*fU*fU*fU*fC*fU | | XOXOXXXXXX | | |
| WV- | UCAAGGAAGA | 718 | Mod033fU*fC*fA*fA*fG*fG*mAfA*m | 1470 | OXXXXXXOXO | with PO linker, Stearic | Exon 51 |
| 3520 | UGGCAUUUCU | | GfA*mUfG*mGfC*fA*fU*fU*fU*fC*fU | | XOXOXXXXXX | | |
| WV- | UCAAGGAAGA | 719 | Mod013L001fU*SfC*SfA*SfA*SfG*SfG | 1471 | OOSSSSSSOSOS | WV-3473, Lauric acid, | Exon 51 |
| 3543 | UGGCAUUUCU | | *SmAfA*SmGmA*SfU*SmGmGfC*SfA | | SOOSSSSSS | C6 PO linker | |
| | | | *SfU*SfU*SfU*SfC*SfU | | | | |
| WV- | UCAAGGAAGA | 720 | Mod005L001fU*SfC*SfA*SfA*SfG*SfG | 1472 | OOSSSSSSOSOS | WV-3473, Palmitic acid, | Exon 51 |
| 3544 | UGGCAUUUCU | | *SmAfA*SmGmA*SfU*SmGmGfC*SfA | | SOOSSSSSS | C6 PO linker | |
| | | | *SfU*SfU*SfU*SfC*SfU | | | | |
| WV- | UCAAGGAAGA | 721 | Mod015L001fU*SfC*SfA*SfA*SfG*SfG | 1473 | OOSSSSSSOSOS | WV-3473, Stearic acid, | Exon 51 |
| 3545 | UGGCAUUUCU | | *SmAfA*SmGmA*SfU*SmGmGfC*SfA | | SOOSSSSSS | C6 PO linker | |
| | | | *SfU*SfU*SfU*SfC*SfU | | | | |
| WV- | UCAAGGAAGA | 722 | Mod020L001fU*SfC*SfA*SfA*SfG*SfG | 1474 | OOSSSSSSOSOS | WV-3473, Turbinaric | Exon 51 |
| 3546 | UGGCAUUUCU | | *SmAfA*SmGmA*SfU*SmGmGfC*SfA | | SOOSSSSSS | acid, C6 PO linker | |
| | | | *SfU*SfU*SfU*SfC*SfU | | | | |
| WV- | UCAAGGAAGA | 723 | Mod027L001fU*SfC*SfA*SfA*SfG*SfG | 1475 | OSSSSSSOSOSS | WV-3473, | Exon 51 |
| 3547 | UGGCAUUUCU | | *SmAfA*SmGmA*SfU*SmGmGfC*SfA | | OOSSSSSS | Monosulfonamide, C6 | |
| | | | *SfU*SfU*SfU*SfC*SfU | | | PO linker | |
| WV- | UCAAGGAAGA | 724 | Mod029L001fU*SfC*SfA*SfA*SfG*SfG | 1476 | OSSSSSSOSOSS | WV-3473, | Exon 51 |
| 3548 | UGGCAUUUCU | | *SmAfA*SmGmA*SfU*SmGmGfC*SfA | | OOSSSSSS | Trisulfonamide, C6 PO | |
| | | | *SfU*SfU*SfU*SfC*SfU | | | linker | |
| WV- | UCAAGGAAGA | 725 | Mod030fU*SfC*SfA*SfA*SfG*SfG*Sm | 1477 | OSSSSSSOSOSS | WV-3473, Laurie, PO | Exon 51 |
| 3549 | UGGCAUUUCU | | AfA*SmGmA*SfU*SmGmGfC*SfA*Sf | | OOSSSSSS | linker | |
| | | | U*SfU*SfU*SfC*SfU | | | | |
| WV- | UCAAGGAAGA | 726 | Mod032fU*SfC*SfA*SfA*SfG*SfG*Sm | 1478 | OSSSSSSOSOSS | WV-3473, Palmitic, PO | Exon 51 |
| 3550 | UGGCAUUUCU | | AfA*SmGmA*SfU*SmGmGfC*SfA*Sf | | OOSSSSSS | linker | |
| | | | U*SfU*SfU*SfC*SfU | | | | |
| WV- | UCAAGGAAGA | 727 | Mod033fU*SfC*SfA*SfA*SfG*SfG*Sm | 1479 | OSSSSSSOSOSS | WV-3473, Stearic, PO | Exon 51 |
| 3551 | UGGCAUUUCU | | AfA*SmGmA*SfU*SmGmGfC*SfA*Sf | | OOSSSSSS | linker | |
| | | | U*SfU*SfU*SfC*SfU | | | | |
| WV- | UCAAGGAAGA | 728 | Mod020L001*fU*SfC*SfA*SfA*SfG*Sf | 1480 | OXSSSSSSOSOS | WV-3473, Turbinaric | Exon 51 |
| 3552 | UGGCAUUUCU | | G*SmAfA*SmGmA*SfU*SmGmGfC*Sf | | SOOSSSSSS | acid, C6 PS linker | |
| | | | A*SfU*SfU*SfU*SfC*SfU | | | | |
| WV- | UCAAGGAAGA | 729 | Mod005L001*fU*SfC*SfA*SfA*SfG*Sf | 1481 | OXSSSSSSOSOS | WV-3473, Palmitic acid, | Exon 51 |
| 3553 | UGGCAUUUCU | | G*SmAfA*SmGmA*SfU*SmGmGfC*Sf | | SOOSSSSSS | C6 PS linker | |
| | | | A*SfU*SfU*SfU*SfC*SfU | | | | |
| WV- | UCAAGGAAGA | 730 | Mod014L001fU*SfC*SfA*SfA*SfG*SfG | 1482 | OOSSSSSSOSOS | WV-3473, Myristic acid, | Exon 51 |
| 3554 | UGGCAUUUCU | | *SmAfA*SmGmA*SfU*SmGmGfC*SfA | | SOOSSSSSS | C6 PO linker | |
| | | | *SfU*SfU*SfU*SfC*SfU | | | | |
| WV- | UCAAGGAAGA | 731 | Mod030*fU*SfC*SfA*SfA*SfG*SfG*S | 1483 | XSSSSSSOSOSS | WV-3473, Laurie PS | Exon 51 |
| 3555 | UGGCAUUUCU | | mAfA*SmGmA*SfU*SmGmGfC*SfA*S | | OOSSSSSS | linker | |
| | | | fU*SfU*SfU*SfC*SfU | | | | |
| WV- | UCAAGGAAGA | 732 | Mod032*fU*SfC*SfA*SfA*SfG*SfG*S | 1484 | XSSSSSSOSOSS | WV-3473, Palmitic PS | Exon 51 |
| 3556 | UGGCAUUUCU | | mAfA*SmGmA*SfU*SmGmGfC*SfA*5 | | OOSSSSSS | linker | |
| | | | fU*SfU*SfU*SfC*SfU | | | | |
| WV- | UCAAGGAAGA | 733 | Mod033*fU*SfC*SfA*SfA*SfG*SfG*S | 1485 | XSSSSSSOSOSS | WV-3473, Stearic PS | Exon 51 |
| 3557 | UGGCAUUUCU | | mAfA*SmGmA*SfU*SmGmGfC*SfA*5 | | OOSSSSSS | linker | |
| | | | fU*SfU*SfU*SfC*SfU | | | | |
| WV- | UCAAGGAAGA | 734 | Mod033*fU*fC*fA*fA*fG*fG*mAfA*m | 1486 | XXXXXXXOXO | with PS linker, Stearic | Exon 51 |
| 3558 | UGGCAUUUCU | | GfA*mUfG*mGfC*fA*fU*fU*fU*fC*fU | | XOXOXXXXXX | linker | |
| WV- | UCAAGGAAGA | 735 | Mod020L001fU*fC*fA*fA*fG*fG*mAf | 1487 | OOXXXXXXOX | with C6 amine PO | Exon 51 |
| 3559 | UGGCAUUUCU | | A*mGfA*mUfG*mGfC*fA*fU*fU*fU*f | | OXOXOXXXXXX | linker, Turbinaric acid | |
| WV- | UCAAGGAAGA | 736 | Mod020L001*fU*fC*fA*fA*fG*fG*mAf | 1488 | OXXXXXXXOX | with C6 amine PS linker, | Exon 51 |
| 3560 | UGGCAUUUCU | | A*mGfA*mUfG*mGfC*fA*fU*fU*fU*f | | OXOXOXXXXXX | Turbinaric acid | |
| | | | C*fU | | | | |
| WV- | UCAAGGAAGA | 737 | L001*fU*SfC*SfA*SfA*SfG*SfG*SmAf | 1489 | XSSSSSSOSOSS | WV-3473, C6 PS linker | Exon 51 |
| 3753 | UGGCAUUUCU | | A* SmGmA*SfU*SmGmGfC*SfA*SfU* | | OOSSSSSS | | |
| | | | SfU*SfU*SfC*SfU | | | | |
| WV- | UCAAGGAAGA | 738 | L001fU*SfC*SfA*SfA*SfG*SfG*SmAf | 1490 | OSSSSSSOSOSS | WV-3473, C6 PO linker | Exon 51 |
| 3754 | UGGCAUUUCU | | A* SmGmA*SfU*SmGmGfC*SfA*SfU* | | OOSSSSSS | | |
| | | | SfU*SfU*SfC*SfU | | | | |
| WV- | GCCAACUGGG | 739 | rGrCrCrArArCrUrGrGrGrArGrCrUrGrGr | 1491 | OOOOOOOOOO | Complementary RNA | MSTN |
| 3812 | AGCUGGAGCG | | ArGrCrGrCrArCrCrArArCrCrArG | | OOOOOOOOOO | | |
| | CACCAACCAG | | | | OOOOOOOOO | | |
| WV- | UCAAGGAAGA | 740 | L001*fU*fC*fA*fA*fG*fG*mAfA*mGf | 1492 | XXXXXXXOXO | WV-3516, C6 PS linker | Exon 51 |
| 3820 | UGGCAUUUCU | | A*mUfG*mGfC*fA*fU*fU*fU*fC*fU | | XOXOXXXXXX | | |
| WV- | UCAAGGAAGA | 741 | L001fU*fC*fA*fA*fG*fG*mAfA*mGfA | 1493 | OXXXXXXOXO | WV-3516, C6 PO linker | Exon 51 |
| 3821 | UGGCAUUUCU | | *mUfG*mGfC*fA*fU*fU*fU*fC*fU | | XOXOXXXXXX | | |
| WV- | UCAAGGAAGA | 742 | Mod015L001*fU*fC*fA*fA*fG*fG*mAf | 1494 | OXXXXXXXOX | WV-3516, C6 PS linker, | Exon 51 |
| 3855 | UGGCAUUUCU | | A*mGfA*mUfG*mGfC*fA*fU*fU*fU*f | | OXOXOXXXXXX | Stearic acid | |
| | | | C*fU | | | | |
| WV- | UCAAGGAAGA | 743 | Mod015L001fU*fC*fA*fA*fG*fG*mAf | 1495 | OOXXXXXXOX | WV-3516, C6 PO linker, | Exon 51 |
| 3856 | UGGCAUUUCU | | A*mGfA*mUfG*mGfC*fA*fU*fU*fU*f | | OXOXOXXXXXX | Stearic acid | |
| | | | C*fU | | | | |
| WV- | CCUUCCCUGAA | 744 | fC*fC*fU*fU*fC*fC*mCfU*GmAfA*m | 1496 | XXXXXXOXOO | Negative control | NA |
| 3975 | GGUUCCUCC | | GmGfU*fU*fC*fC*fU*fC*fC | | XOOXXXXXX | | |
| WV- | CCUUCCCUGAA | 745 | L001fC*fC*fU*fU*fC*fC*mCfU*GmAf | 1497 | OXXXXXXOXO | Negative control | NA |
| 3976 | GGUUCCUCC | | A*mGmGfU*fU*fC*fC*fU*fC*fC | | OXOOXXXXXX | | |
| WV- | CCUUCCCUGAA | 746 | Mod020L001fC*fC*fU*fU*fC*fC*mCfU | 1498 | OOXXXXXXOX | Negative control | NA |
| 3977 | GGUUCCUCC | | *GmAfA*mGmGfU*fU*fC*fC*fU*fC*fC | | OOXOOXXXXXX | | |
| WV- | CCUUCCCUGAA | 747 | fC*fC*fU*fU*fC*fC*mCfU*mGmAfA* | 1499 | XXXXXXOXOO | Negative control | NA |
| 3978 | GGUUCCUCC | | mGmGfU*fU*fC*fC*fU*fC*fC | | XOOXXXXXX | | |
| WV- | CCUUCCCUGAA | 748 | L001fC*fC*fU*fU*fC*fC*mCfU*mGm | 1500 | OXXXXXXOXO | Negative control | NA |
| 3979 | GGUUCCUCC | | AfA*mGmGfU*fU*fC*fC*fU*fC*fC | | OXOOXXXXXX | | |
| WV- | CCUUCCCUGAA | 749 | Mod020L001fC*fC*fU*fU*fC*fC*mCfU | 1501 | OOXXXXXXOX | Negative control | NA |
| 3980 | GGUUCCUCC | | *mGmAfA*mGmGfU*fU*fC*fC*fU*fC | | OOXOOXXXXXX | | |
| | | | *fC | | | | |
| WV- | UCAAGGAAGA | 750 | Mod015L001*fU*SfC*SfA*SfA*SfG*Sf | 1502 | OXSSSSSSOSOS | WV-3473, C6 PS linker, | Exon 51 |
| 4106 | UGGCAUUUCU | | G*SmAfA*SmGmA*SfU*SmGmGfC*Sf | | SOOSSSSSS | Stearic acid | |
| | | | A*SfU*SfU*SfU*SfC*SfU | | | | |
| WV- | UCAAGGAAGA | 751 | Mod015L001*SfU*SfC*SfA*SfA*SfG*S | 1503 | OSSSSSSSOSOSS | WV-3473, Sp stereopure | DMD |
| 4107 | UGGCAUUUCU | | fG*SmAfA*SmGmA*SfU*SmGmGfC*S | | OOSSSSSS | C6 linker, stearic acid | |
| | | | fA*SfU*SfU*SfU*SfC*SfU | | | | |
| WV- | UCAAGGAAGA | 752 | L001 * SfU * SfC * SfA * SfA * SfG * | 1504 | SSSSSSSOSOSSO | WV-3473, C6 and Sp | DMD |
| 4191 | UGGCAUUUCU | | SfG * SmAfA * SmGmA * SfU * | | OSSSSSS | stereopure linker | |
| | | | SmGmGfC * SfA * SfU * SfU * SfU * | | | | |
| | | | SfC * SfU | | | | |
| WV- | UCAAGGAAGA | 753 | fU*SfC*SfA*SfA*SfG*SfG*SmAfA*Sm | 1505 | SSSSSSOSOSSO | WV-3473 based, n-1 on | DMD |
| 4231 | UGGCAUUUC | | GmA*SfU*SmGmGfC*SfA*SfU*SfU*Sf | | OSSSSS | 3′ | |
| | | | U*SfC | | | | |
| WV- | UCAAGGAAGA | 754 | fU*SfC*SfA*SfA*SfG*SfG*SmAfA*Sm | 1506 | SSSSSSOSOSSO | WV-3473 based, n-2 on | DMD |
| 4232 | UGGCAUUU | | GmA*SfU*SmGmGfC*SfA*SfU*SfU*SfU | | OSSSS | 3′ | |
| WV- | CAAGGAAGAU | 755 | fC*SfA*SfA*SfG*SfG*SmAfA*SmGmA | 1507 | SSSSSOSOSSOO | WV-3473 based, n-1 on | DMD |
| 4233 | GGCAUUUCU | | *SfU*SmGmGfC*SfA*SfU*SfU*SfU*Sf | | SSSSSS | 5′ | |
| | | | C*SfU | | | | |
| WV- | GGCCAAACCUC | 756 | Mod020L001mG*mG*mC*mC*mA*mA | 1508 | OOXXXXXXXX | WV-943, C6 linker and | DMD |
| 4610 | GGCUUACCU | | *mA*mC*mC*mU*mC*mG*mG*mC*m | | XXXXXXXXXXX | PO, Turbinaric acid | mouse |
| | | | U*mU*mA*mC*mC*mU | | | | Exon23 |
| WV- | GGCCAAACCUC | 757 | Mod015L001mG*mG*mC*mC*mA*mA | 1509 | OOXXXXXXXX | WV-943, C6 linker and | DMD |
| 4611 | GGCUUACCU | | *mA*mC*mC*mU*mC*mG*mG*mC*m | | XXXXXXXXXXX | PO, Stearic acid | mouse |
| | | | U*mU*mA*mC*mC*mU | | | | Exon23 |
| WV- | UUCUGUAAGG | 758 | fU*fU*fC*fU*fG*fU*mA*mA*mG*mG | 1510 | XXXXXXXXXX | DMD mouse Exon23 | DMD |
| 4614 | UUUUUAUGUG | | *mU*mU*mU*mU*fU*fA*fU*fG*fU*fG | | XXXXXXXXX | | |
| WV- | AUUUCUGUAA | 759 | fA*fU*fU*fU*fC*fU*mG*mU*mA*mA | 1511 | XXXXXXXXXX | DMD mouse Exon23 | DMD |
| 4615 | GGUUUUUAUG | | *mG*mG*mU*mU*fU*fU*fU*fA*fU*fG | | XXXXXXXXX | | |
| WV- | CCAUUUCUGU | 760 | fC*fC*fA*fU*fU*fU*mC*mU*mG*mU* | 1512 | XXXXXXXXXX | DMD mouse Exon23 | DMD |
| 4616 | AAGGUUUUUA | | mA*mA*mG*mG*fU*fU*fU*fU*fU*fA | | XXXXXXXXX | | |
| WV- | AUCCAUUUCU | 761 | fA*fU*fC*fC*fA*fU*mU*mU*mC*mU* | 1513 | XXXXXXXXXX | DMD mouse Exon23 | DMD |
| 4617 | GUAAGGUUUU | | mG*mU*mA*mA*fG*fG*fU*fU*fU*fU | | XXXXXXXXX | | |
| WV- | CAUCCAUUUCU | 762 | fC*fA*fU*fC*fC*fA*mU*mU*mU*mC* | 1514 | XXXXXXXXXX | DMD mouse Exon23 | DMD |
| 4618 | GUAAGGUUU | | mU*mG*mU*mA*fA*fG*fG*fU*fU*fU | | XXXXXXXXX | | |
| WV- | CCAUCCAUUUC | 763 | fC*fC*fA*fU*fC*fC*mA*mU*mU*mU* | 1515 | XXXXXXXXXX | DMD mouse Exon23 | DMD |
| 4619 | UGUAAGGUU | | mC*mU*mG*mU*fA*fA*fG*fG*fU*fU | | XXXXXXXXX | | |
| WV- | GCCAUCCAUUU | 764 | fG*fC*fC*fA*fU*fC*mC*mA*mU*mU* | 1516 | XXXXXXXXXX | DMD mouse Exon23 | DMD |
| 4620 | CUGUAAGGU | | mU*mC*mU*mG*fU*fA*fA*fG*fG*fU | | XXXXXXXXX | | |
| WV- | AGCCAUCCAUU | 765 | fA*fG*fC*fC*fA*fU*mC*mC*mA*mU* | 1517 | XXXXXXXXXX | DMD mouse Exon23 | DMD |
| 4621 | UCUGUAAGG | | mU*mU*mC*mU*fG*fU*fA*fA*fG*fG | | XXXXXXXXX | | |
| WV- | CAGCCAUCCAU | 766 | fC*fA*fG*fC*fC*fA*mU*mC*mC*mA* | 1518 | XXXXXXXXXX | DMD mouse Exon23 | DMD |
| 4622 | UUCUGUAAG | | mU*mU*mU*mC*fU*fG*fU*fA*fA*fG | | XXXXXXXXX | | |
| WV- | UCAGCCAUCCA | 767 | fU*fC*fA*fG*fC*fC*mA*mU*mC*mC* | 1519 | XXXXXXXXXX | DMD mouse Exon23 | DMD |
| 4623 | UUUCUGUAA | | mA*mU*mU*mU*fC*fU*fG*fU*fA*fA | | XXXXXXXXX | | |
| WV- | UUCAGCCAUCC | 768 | fU*fU*fC*fA*fG*fC*mC*mA*mU*mC* | 1520 | XXXXXXXXXX | DMD mouse Exon23 | DMD |
| 4624 | AUUUCUGUA | | mC*mA*mU*mU*fU*fC*fU*fG*fU*fA | | XXXXXXXXX | | |
| WV- | CUUCAGCCAUC | 769 | fC*fU*fU*fC*fA*fG*mC*mC*mA*mU* | 1521 | XXXXXXXXXX | DMD mouse Exon23 | DMD |
| 4625 | CAUUUCUGU | | mC*mC*mA*mU*fU*fU*fC*ffl*fG*fU | | XXXXXXXXX | | |
| WV- | ACUUCAGCCAU | 770 | fA*fC*fU*fU*fC*fA*mG*mC*mC*mA* | 1522 | XXXXXXXXXX | DMD mouse Exon23 | DMD |
| 4626 | CCAUUUCUG | | mU*mC*mC*mA*fU*fU*fU*fC*fU*fG | | XXXXXXXXX | | |
| WV- | AACUUCAGCCA | 771 | fA*fA*fC*fU*fU*fC*mA*mG*mC*mC* | 1523 | XXXXXXXXXX | DMD mouse Exon23 | DMD |
| 4627 | UCCAUUUCU | | mA*mU*mC*mC*fA*fU*fU*fU*fC*fU | | XXXXXXXXX | | |
| WV- | CAACUUCAGCC | 772 | fC*fA*fA*fC*fU*fU*mC*mA*mG*mC* | 1524 | XXXXXXXXXX | DMD mouse Exon23 | DMD |
| 4628 | AUCCAUUUC | | mC*mA*mU*mC*fC*fA*fU*fU*fU*fC | | XXXXXXXXX | | |
| WV- | UCAACUUCAGC | 773 | fU*fC*fA*fA*fC*fU*mU*mC*mA*mG* | 1525 | XXXXXXXXXX | DMD mouse Exon23 | DMD |
| 4629 | CAUCCAUUU | | mC*mC*mA*mU*fC*fC*fA*fU*fU*fU | | XXXXXXXXX | | |
| WV- | AUCAACUUCA | 774 | fA*fU*fC*fA*fA*fC*mU*mU*mC*mA* | 1526 | XXXXXXXXXX | DMD mouse Exon23 | DMD |
| 4630 | GCCAUCCAUU | | mG*mC*mC*mA*fU*fC*fC*fA*fU*fU | | XXXXXXXXX | | |
| WV- | CAUCAACUUCA | 775 | fC*fA*fU*fC*fA*fA*mC*mU*mU*mC* | 1527 | XXXXXXXXXX | DMD mouse Exon23 | DMD |
| 4631 | GCCAUCCAU | | mA*mG*mC*mC*fA*fU*fC*fC*fA*fU | | XXXXXXXXX | | |
| WV- | ACAUCAACUUC | 776 | fA*fC*fA*fU*fC*fA*mA*mC*mU*mU* | 1528 | XXXXXXXXXX | DMD mouse Exon23 | DMD |
| 4632 | AGCCAUCCA | | mC*mA*mG*mC*fC*fA*fU*fC*fC*fA | | XXXXXXXXX | | |
| WV- | AACAUCAACU | 777 | fA*fA*fC*fA*fU*fC*mA*mA*mC*mU* | 1529 | XXXXXXXXXX | DMD mouse Exon23 | DMD |
| 4633 | UCAGCCAUCC | | mU*mC*mA*mG*fC*fC*fA*fU*fC*fC | | XXXXXXXXX | | |
| WV- | GAAAACAUCA | 778 | fG*fA*fA*fA*fA*fC*mA*mU*mC*mA | 1530 | XXXXXXXXXX | DMD mouse Exon23 | DMD |
| 4634 | ACUUCAGCCA | | *mA*mC*mU*mU*fC*fA*fG*fC*fC*fA | | XXXXXXXXX | | |
| WV- | CAGGAAAACA | 779 | fC*fA*fG*fG*fA*fA*mA*mA*mC*mA | 1531 | XXXXXXXXXX | DMD mouse Exon23 | DMD |
| 4635 | UCAACUUCAG | | *mU*mC*mA*mA*fC*fU*fU*fC*fA*fG | | XXXXXXXXX | | |
| WV- | UUUCAGGAAA | 780 | fU*fU*fU*fC*fA*fG*mG*mA*mA*mA | 1532 | XXXXXXXXXX | DMD mouse Exon23 | DMD |
| 4636 | ACAUCAACUU | | *mA*mC*mA*mU*fC*fA*fA*fC*fU*fU | | XXXXXXXXX | | |
| WV- | CUCUUUCAGG | 781 | fC*fU*fC*fU*fU*fU*mC*mA*mG*mG* | 1533 | XXXXXXXXXX | DMD mouse Exon23 | DMD |
| 4637 | AAAACAUCAA | | mA*mA*mA*mA*fC*fA*fU*fC*fA*fA | | XXXXXXXXX | | |
| WV- | UUCCUCUUUCA | 782 | fU*fU*fC*fC*fU*fC*mU*mU*mU*mC* | 1534 | XXXXXXXXXX | DMD mouse Exon23 | DMD |
| 4638 | GGAAAACAU | | mA*mG*mG*mA*fA*fA*fA*fC*fA*fU | | XXXXXXXXX | | |
| WV- | GCCAUUCCUCU | 783 | fG*fC*fC*fA*ftl*fU*mC*mC*mU*mC* | 1535 | XXXXXXXXXX | DMD mouse Exon23 | DMD |
| 4639 | UUCAGGAAA | | mU*mU*mU*mC*fA*fG*fG*fA*fA*fA | | XXXXXXXXX | | |
| WV- | GGCCAUUCCUC | 784 | fG*fG*fC*fC*fA*fU*mU*mC*mC*mU* | 1536 | XXXXXXXXXX | DMD mouse Exon23 | DMD |
| 4640 | UUUCAGGAA | | mC*mU*mU*mU*fC*fA*fG*fG*fA*fA | | XXXXXXXXX | | |
| WV- | AGGCCAUUCCU | 785 | fA*fG*fG*fC*fC*fA*mU*mU*mC*mC* | 1537 | XXXXXXXXXX | DMD mouse Exon23 | DMD |
| 4641 | CUUUCAGGA | | mU*mC*mU*mU*fU*fC*fA*fG*fG*fA | | XXXXXXXXX | | |
| WV- | CAGGCCAUUCC | 786 | fC*fA*fG*fG*fC*fC*mA*mU*mU*mC* | 1538 | XXXXXXXXXX | DMD mouse Exon23 | DMD |
| 4642 | UCUUUCAGG | | mC*mU*mC*mU*fU*fU*fC*fA*fG*fG | | XXXXXXXXX | | |
| WV- | GCAGGCCAUUC | 787 | fG*fC*fA*fG*fG*fC*mC*mA*mU*mU* | 1539 | XXXXXXXXXX | DMD mouse Exon23 | DMD |
| 4643 | CUCUUUCAG | | mC*mC*mU*mC*fU*fU*fU*fC*fA*fG | | XXXXXXXXX | | |
| WV- | GGCAGGCCAU | 788 | fG*fG*fC*fA*fG*fG*mC*mC*mA*mU* | 1540 | XXXXXXXXXX | DMD mouse Exon23 | DMD |
| 4644 | UCCUCUUUCA | | mU*mC*mC*mU*fC*fU*fU*fU*fC*fA | | XXXXXXXXX | | |
| WV- | GGGCAGGCCA | 789 | fG*fG*fG*fC*fA*fG*mG*mC*mC*mA* | 1541 | XXXXXXXXXX | DMD mouse Exon23 | DMD |
| 4645 | UUCCUCUUUC | | mU*mU*mC*mC*fU*fC*fU*fU*fU*fC | | XXXXXXXXX | | |
| WV- | AGGGCAGGCC | 790 | fA*fG*fG*fG*fC*fA*mG*mG*mC*mC* | 1542 | XXXXXXXXXX | DMD mouse Exon23 | DMD |
| 4646 | AUUCCUCUUU | | mA*mU*mU*mC*fC*fU*fC*fU*fU*fU | | XXXXXXXXX | | |
| WV- | CAGGGCAGGCC | 791 | fC*fA*fG*fG*fG*fC*mA*mG*mG*mC* | 1543 | XXXXXXXXXX | DMD mouse Exon23 | DMD |
| 4647 | AUUCCUCUU | | mC*mA*mU*mU*fC*fC*fU*fC*fU*fU | | XXXXXXXXX | | |
| WV- | CCAGGGCAGGC | 792 | fC*fC*fA*fG*fG*fG*mC*mA*mG*mG* | 1544 | XXXXXXXXXX | DMD mouse Exon23 | DMD |
| 4648 | CAUUCCUCU | | mC*mC*mA*mU*fU*fC*fC*fU*fC*fU | | XXXXXXXXX | | |
| WV- | CCCAGGGCAGG | 793 | fC*fC*fC*fA*fG*fG*mG*mC*mA*mG* | 1545 | XXXXXXXXXX | DMD mouse Exon23 | DMD |
| 4649 | CCAUUCCUC | | mG*mC*mC*mA*fU*fU*fC*fC*fU*fC | | XXXXXXXXX | | |
| WV- | CCCCAGGGCAG | 794 | fC*fC*fC*fC*fA*fG*mG*mG*mC*mA* | 1546 | XXXXXXXXXX | DMD mouse Exon23 | DMD |
| 4650 | GCCAUUCCU | | mG*mG*mC*mC*fA*fU*fU*fC*fC*fU | | XXXXXXXXX | | |
| WV- | CCCCCAGGGCA | 795 | fC*fC*fC*fC*fC*fA*mG*mG*mG*mC* | 1547 | XXXXXXXXXX | DMD mouse Exon23 | DMD |
| 4651 | GGCCAUUCC | | mA*mG*mG*mC*fC*fA*fU*fU*fC*fC | | XXXXXXXXX | | |
| WV- | UCCCCCAGGGC | 796 | fU*fC*fC*fC*fC*fC*mA*mG*mG*mG* | 1548 | XXXXXXXXXX | DMD mouse Exon23 | DMD |
| 4652 | AGGCCAUUC | | mC*mA*mG*mG*fC*fC*fA*fU*fU*fC | | XXXXXXXXX | | |
| WV- | AUCCCCCAGGG | 797 | fA*fU*fC*fC*fC*fC*mC*mA*mG*mG* | 1549 | XXXXXXXXXX | DMD mouse Exon23 | DMD |
| 4653 | CAGGCCAUU | | mG*mC*mA*mG*fG*fC*fC*fA*fU*fU | | XXXXXXXXX | | |
| WV- | CAUCCCCCAGG | 798 | fC*fA*fU*fC*fC*fC*mC*mC*mA*mG* | 1550 | XXXXXXXXXX | DMD mouse Exon23 | DMD |
| 4654 | GCAGGCCAU | | mG*mG*mC*mA*fG*fG*fC*fC*fA*fU | | XXXXXXXXX | | |
| WV- | GCAUCCCCCAG | 799 | fG*fC*fA*fU*fC*fC*mC*mC*mC*mA* | 1551 | XXXXXXXXXX | DMD mouse Exon23 | DMD |
| 4655 | GGCAGGCCA | | mG*mG*mG*mC*fA*fG*fG*fC*fC*fA | | XXXXXXXXX | | |
| WV- | AGCAUCCCCCA | 800 | fA*fG*fC*fA*fU*fC*mC*mC*mC*mC* | 1552 | XXXXXXXXXX | DMD mouse Exon23 | DMD |
| 4656 | GGGCAGGCC | | mA*mG*mG*mG*fC*fA*fG*fG*fC*fC | | XXXXXXXXX | | |
| WV- | CAGCAUCCCCC | 801 | fC*fA*fG*fC*fA*fU*mC*mC*mC*mC* | 1553 | XXXXXXXXXX | DMD mouse Exon23 | DMD |
| 4657 | AGGGCAGGC | | mC*mA*mG*mG*fG*fC*fA*fG*fG*fC | | XXXXXXXXX | | |
| WV- | UCAGCAUCCCC | 802 | fU*fC*fA*fG*fC*fA*mU*mC*mC*mC* | 1554 | XXXXXXXXXX | DMD mouse Exon23 | DMD |
| 4658 | CAGGGCAGG | | mC*mC*mA*mG*fG*fG*fC*fA*fG*fG | | XXXXXXXXX | | |
| WV- | UUCAGCAUCCC | 803 | fU*fU*fC*fA*fG*fC*mA*mU*mC*mC* | 1555 | XXXXXXXXXX | DMD mouse Exon23 | DMD |
| 4659 | CCAGGGCAG | | mC*mC*mC*mA*fG*fG*fG*fC*fA*fG | | XXXXXXXXX | | |
| WV- | UUUCAGCAUCC | 804 | fU*fU*fU*fC*fA*fG*mC*mA*mU*mC* | 1556 | XXXXXXXXXX | DMD mouse Exon23 | DMD |
| 4660 | CCCAGGGCA | | mC*mC*mC*mC*fA*fG*fG*fG*fC*fA | | XXXXXXXXX | | |
| WV- | AUUUCAGCAU | 805 | fA*fU*fU*fU*fC*fA*mG*mC*mA*mU | 1557 | XXXXXXXXXX | DMD mouse Exon23 | DMD |
| 4661 | CCCCCAGGGC | | *mC*mC*mC*mC*fC*fA*fG*fG*fG*fC | | XXXXXXXXX | | |
| WV- | GAUUUCAGCA | 806 | fG*fA*fU*fU*fU*fC*mA*mG*mC*mA | 1558 | XXXXXXXXXX | DMD mouse Exon23 | DMD |
| 4662 | UCCCCCAGGG | | *mU*mC*mC*mC*fC*fC*fA*fG*fG*fG | | XXXXXXXXX | | |
| WV- | GGAUUUCAGC | 807 | fG*fG*fA*fU*fU*fU*mC*mA*mG*mC | 1559 | XXXXXXXXXX | DMD mouse Exon23 | DMD |
| 4663 | AUCCCCCAGG | | *mA*mU*mC*mC*fC*fC*fC*fA*fG*fG | | XXXXXXXXX | | |
| WV- | AGGAUUUCAG | 808 | fA*fG*fG*fA*fU*fU*mU*mC*mA*mG | 1560 | XXXXXXXXXX | DMD mouse Exon23 | DMD |
| 4664 | CAUCCCCCAG | | *mC*mA*mU*mC*fC*fC*fC*fC*fA*fG | | XXXXXXXXX | | |
| WV- | CAGGAUUUCA | 809 | fC*fA*fG*fG*fA*fU*mU*mU*mC*mA | 1561 | XXXXXXXXXX | DMD mouse Exon23 | DMD |
| 4665 | GCAUCCCCCA | | *mG*mC*mA*mU*fC*fC*fC*fC*fC*fA | | XXXXXXXXX | | |
| WV- | UCAGGAUUUC | 810 | fU*fC*fA*fG*fG*fA*mU*mU*mU*mC | 1562 | XXXXXXXXXX | DMD mouse Exon23 | DMD |
| 4666 | AGCAUCCCCC | | *mA*mG*mC*mA*fU*fC*fC*fC*fC*fC | | XXXXXXXXX | | |
| WV- | UUCAGGAUUU | 811 | fU*fU*fC*fA*fG*fG*mA*mU*mU*mU | 1563 | XXXXXXXXXX | DMD mouse Exon23 | DMD |
| 4667 | CAGCAUCCCC | | *mC*mA*mG*mC*fA*fU*fC*fC*fC*fC | | XXXXXXXXX | | |
| WV- | UUUCAGGAUU | 812 | fU*fU*fU*fC*fA*fG*mG*mA*mU*mU | 1564 | XXXXXXXXXX | DMD mouse Exon23 | DMD |
| 4668 | UCAGCAUCCC | | *mU*mC*mA*mG*fC*fA*fU*fC*fC*fC | | XXXXXXXXX | | |
| WV- | UUUUCAGGAU | 813 | fU*fU*fU*fU*fC*fA*mG*mG*mA*mU | 1565 | XXXXXXXXXX | DMD mouse Exon23 | DMD |
| 4669 | UUCAGCAUCC | | *mU*mU*mC*mA*fG*fC*fA*fU*fC*fC | | XXXXXXXXX | | |
| WV- | UUUUUCAGGA | 814 | fU*fU*fU*fU*fU*fC*mA*mG*mG*mA | 1566 | XXXXXXXXXX | DMD mouse Exon23 | DMD |
| 4670 | UUUCAGCAUC | | *mU*mU*mU*mC*fA*fG*fC*fA*fU*fC | | XXXXXXXXX | | |
| WV- | UUUUUUCAGG | 815 | fU*fU*fU*fU*fU*fU*mC*mA*mG*mG | 1567 | XXXXXXXXXX | DMD mouse Exon23 | DMD |
| 4671 | AUUUCAGCAU | | *mA*mU*mU*mU*fC*fA*fG*fC*fA*fU | | XXXXXXXXX | | |
| WV- | GUUUUUUCAG | 816 | fG*fU*fU*fU*fU*fU*mU*mC*mA*mG | 1568 | XXXXXXXXXX | DMD mouse Exon23 | DMD |
| 4672 | GAUUUCAGCA | | *mG*mA*mU*mU*fU*fC*fA*fG*fC*fA | | XXXXXXXXX | | |
| WV- | UGUUUUUUCA | 817 | fU*fG*fU*fU*fU*fU*mU*mU*mC*mA | 1569 | XXXXXXXXXX | DMD mouse Exon23 | DMD |
| 4673 | GGAUUUCAGC | | *mG*mG*mA*mU*fU*fU*fC*fA*fG*fC | | XXXXXXXXX | | |
| WV- | CUGUUUUUUC | 818 | fC*fU*fG*fU*fU*fU*mU*mU*mU*mC | 1570 | XXXXXXXXXX | DMD mouse Exon23 | DMD |
| 4674 | AGGAUUUCAG | | *mA*mG*mG*mA*fU*fU*fU*fC*fA*fG | | XXXXXXXXX | | |
| WV- | GCUGUUUUUU | 819 | fG*fC*fU*fG*fU*fU*mU*mU*mU*mU | 1571 | XXXXXXXXXX | DMD mouse Exon23 | DMD |
| 4675 | CAGGAUUUCA | | *mC*mA*mG*mG*fA*fU*fU*fU*fC*fA | | XXXXXXXXX | | |
| WV- | AGCUGUUUUU | 820 | fA*fG*fC*fU*fG*fU*mU*mU*mU*mU | 1572 | XXXXXXXXXX | DMD mouse Exon23 | DMD |
| 4676 | UCAGGAUUUC | | *mU*mC*mA*mG*fG*fA*fU*fU*fU*fC | | XXXXXXXXX | | |
| WV- | GAGCUGUUUU | 821 | fG*fA*fG*fC*fU*fG*mU*mU*mU*mU | 1573 | XXXXXXXXXX | DMD mouse Exon23 | DMD |
| 4677 | UUCAGGAUUU | | *mU*mU*mC*mA*fG*fG*fA*fU*fU*fU | | XXXXXXXXX | | |
| WV- | UGAGCUGUUU | 822 | fU*fG*fA*fG*fC*fU*mG*mU*mU*mU | 1574 | XXXXXXXXXX | DMD mouse Exon23 | DMD |
| 4678 | UUUCAGGAUU | | *mU*mU*mU*mC*fA*fG*fG*fA*fU*fU | | XXXXXXXXX | | |
| WV- | UUGAGCUGUU | 823 | fU*fU*fG*fA*fG*fC*mU*mG*mU*mU | 1575 | XXXXXXXXXX | DMD mouse Exon23 | DMD |
| 4679 | UUUUCAGGAU | | *mU*mU*mU*mU*fC*fA*fG*fG*fA*fU | | XXXXXXXXX | | |
| WV- | UUUGAGCUGU | 824 | fU*fU*fU*fG*fA*fG*mC*mU*mG*mU | 1576 | XXXXXXXXXX | DMD mouse Exon23 | DMD |
| 4680 | UUUUUCAGGA | | *mU*mU*mU*mU*fU*fC*fA*fG*fG*fA | | XXXXXXXXX | | |
| WV- | GUUUGAGCUG | 825 | fG*fU*fU*fU*fG*fA*mG*mC*mU*mG | 1577 | XXXXXXXXXX | DMD mouse Exon23 | DMD |
| 4681 | UUUUUUCAGG | | *mU*mU*mU*mU*fU*fU*fC*fA*fG*fG | | XXXXXXXXX | | |
| WV- | UUGUUUGAGC | 826 | fU*fU*fG*fU*fU*fU*mG*mA*mG*mC | 1578 | XXXXXXXXXX | DMD mouse Exon23 | DMD |
| 4682 | UGUUUUUUCA | | *mU*mG*mU*mU*fU*fU*fU*fU*fC*fA | | XXXXXXXXX | | |
| WV- | CAUUGUUUGA | 827 | fC*fA*fU*fU*fG*fU*mU*mU*mG*mA | 1579 | XXXXXXXXXX | DMD mouse Exon23 | DMD |
| 4683 | GCUGUUUUUU | | *mG*mC*mU*mG*fU*fU*fU*fU*fU*fU | | XXXXXXXXX | | |
| WV- | GCAUUGUUUG | 828 | fG*fC*fA*fU*fU*fG*mU*mU*mU*mG | 1580 | XXXXXXXXXX | DMD mouse Exon23 | DMD |
| 4684 | AGCUGUUUUU | | *mA*mG*mC*mU*fG*fU*fU*fU*fU*fU | | XXXXXXXXX | | |
| WV- | UGCAUUGUUU | 829 | fU*fG*fC*fA*fU*fU*mG*mU*mU*mU | 1581 | XXXXXXXXXX | DMD mouse Exon23 | DMD |
| 4685 | GAGCUGUUUU | | *mG*mA*mG*mC*fU*fG*fU*fU*fU*fU | | XXXXXXXXX | | |
| WV- | CUGCAUUGUU | 830 | fC*fU*fG*fC*fA*fU*mU*mG*mU*mU | 1582 | XXXXXXXXXX | DMD mouse Exon23 | DMD |
| 4686 | UGAGCUGUUU | | *mU*mG*mA*mG*fC*fU*fG*fU*fU*fU | | XXXXXXXXX | | |
| WV- | UCUGCAUUGU | 831 | fU*fC*fU*fG*fC*fA*mU*mU*mG*mU | 1583 | XXXXXXXXXX | DMD mouse Exon23 | DMD |
| 4687 | UUGAGCUGUU | | *mU*mU*mG*mA*fG*fC*fU*fG*fU*fU | | XXXXXXXXX | | |
| WV- | CUCUGCAUUG | 832 | fC*fU*fC*fU*fG*fC*mA*mU*mU*mG* | 1584 | XXXXXXXXXX | DMD mouse Exon23 | DMD |
| 4688 | UUUGAGCUGU | | mU*mU*mU*mG*fA*fG*fC*fU*fG*fU | | XXXXXXXXX | | |
| WV- | ACUCUGCAUU | 833 | fA*fC*fU*fC*fU*fG*mC*mA*mU*mU* | 1585 | XXXXXXXXXX | DMD mouse Exon23 | DMD |
| 4689 | GUUUGAGCUG | | mG*mU*mU*mU*fG*fA*fG*fC*fU*fG | | XXXXXXXXX | | |
| WV- | UACUCUGCAU | 834 | fU*fA*fC*fU*fC*fU*mG*mC*mA*mU* | 1586 | XXXXXXXXXX | DMD mouse Exon23 | DMD |
| 4690 | UGUUUGAGCU | | mU*mG*mU*mU*fU*fG*fA*fG*fC*fU | | XXXXXXXXX | | |
| WV- | UUACUCUGCA | 835 | fU*fU*fA*fC*fU*fC*mU*mG*mC*mA* | 1587 | XXXXXXXXXX | DMD mouse Exon23 | DMD |
| 4691 | UUGUUUGAGC | | mU*mU*mG*mU*fU*fU*fG*fA*fG*fC | | XXXXXXXXX | | |
| WV- | CUUACUCUGCA | 836 | fC*fU*fU*fA*fC*fU*mC*mU*mG*mC* | 1588 | XXXXXXXXXX | DMD mouse Exon23 | DMD |
| 4692 | UUGUUUGAG | | mA*mU*mU*mG*fU*fU*fU*fG*fA*fG | | XXXXXXXXX | | |
| WV- | UCUUACUCUGC | 837 | fU*fC*fU*fU*fA*fC*mU*mC*mU*mG* | 1589 | XXXXXXXXXX | DMD mouse Exon23 | DMD |
| 4693 | AUUGUUUGA | | mC*mA*mU*mU*fG*fU*fU*fU*fG*fA | | XXXXXXXXX | | |
| WV- | AUCUUACUCU | 838 | fA*fU*fC*fU*fU*fA*mC*mU*mC*mU* | 1590 | XXXXXXXXXX | DMD mouse Exon23 | DMD |
| 4694 | GCAUUGUUUG | | mG*mC*mA*mU*fU*fG*fU*fU*fU*fG | | XXXXXXXXX | | |
| WV- | AAUCUUACUC | 839 | fA*fA*fU*fC*fU*fU*mA*mC*mU*mC* | 1591 | XXXXXXXXXX | DMD mouse Exon23 | DMD |
| 4695 | UGCAUUGUUU | | mU*mG*mC*mA*fU*fU*fG*fU*fU*fU | | XXXXXXXXX | | |
| WV- | CAAAUCUUAC | 840 | fC*fA*fA*fA*fU*fC*mU*mU*mA*mC* | 1592 | XXXXXXXXXX | DMD mouse Exon23 | DMD |
| 4696 | UCUGCAUUGU | | mU*mC*mU*mG*fC*fA*fU*fU*fG*fU | | XXXXXXXXX | | |
| WV- | GAUACAAAUC | 841 | fG*fA*fU*fA*fC*fA*mA*mA*mU*mC | 1593 | XXXXXXXXXX | DMD mouse Exon23 | DMD |
| 4697 | UUACUCUGCA | | *mU*mU*mA*mC*fU*fC*fU*fG*fC*fA | | XXXXXXXXX | | |
| WV- | GGGUCAGCT | 842 | mG*mG*mG*mU*mC*A*G*C*T*G* | 1594 | XXXXXXXXX | ASO1 Malat1 2OMe | Malat1 |
| 2559 | GCCAATGCU | | C*C*A*A*T*mG*mC*mU*mA*mG | | XXXXXXXXXX | 5-10-5 Full PS version | |
| | AG | | | | | | |
| WV- | GGGUCAGCT | 843 | mG*mGmGmUmC*A*G*C*T*G*C*C | 1595 | XOOOXXXXX | ASO1 Malat1 2OMe | Malat1 |
| 2560 | GCCAATGCU | | *A*A*T*mGmCmUmA*mG | | XXXXXXOOOX | 5-10-5 WV-1497 like | |
| | AG | | | | | version | |
| WV- | GGGUCAGCT | 844 | mG*G*mG*mU*mC*A*G*C*T*G*C* | 1596 | XXXXXXXXX | ASO1 Malat1 2OMe | Malat1 |
| 2562 | GCCAATGCU | | C*A*A*T*mG*mC*mU*A*mG | | XXXXXXXXXX | 1-1-3-10-3-1-1 Full PS | |
| | AG | | | | | version Frank2 | |
| WV- | GGGUCAGCT | 845 | mG*G*mGmUmC*A*G*C*T*G*C*C | 1597 | XXOOXXXXX | ASO1 Malat1 2OMe | Malat1 |
| 2564 | GCCAATGCU | | *A*A*T*mGmCmUA*mG | | XXXXXXOOOX | 1-1-3-10-3-1-1 PO PS | |
| | AG | | | | | Frank2 | |
| WV- | GGGUCAGCT | 846 | mG*mG*G*mU*mC*A*G*C*T*G*C* | 1598 | XXXXXXXXX | ASO1 Malat1 2OMe | Malat1 |
| 2566 | GCCAATGCTAG | | C*A*A*T*mG*mC*T*mA*mG | | XXXXXXXXXX | 2-1-2-10-2-1-2 Full PS | |
| | | | | | | version Frank3 | |
| WV- | GGGUCAGCT | 847 | mG*mGG*mUmC*A*G*C*T*G*C*C | 1599 | XOXOXXXXX | ASO1 Malat1 2OMe | Malat1 |
| 2568 | GCCAATGCTAG | | *A*A*T*mGmCT*mA*mG | | XXXXXXOOXX | 2-1-2-10-2-1-2 PO PS | |
| | | | | | | version Frank3 | |
| WV- | GGGTCAGCTG | 848 | mG*mG*mG*T*mC*A*G*C*T*G*C* | 1600 | XXXXXXXXX | ASO1 Malat1 2OMe | Malat1 |
| 2570 | CCAATGCUAG | | C*A*A*T*mG*C*mU*mA*mG | | XXXXXXXXXX | 3-1-1-10-1-1-3 Full PS | |
| | | | | | | version Nenad1 | |
| WV- | GGGTCAGCTG | 849 | mG*mGmGT*mC*A*G*C*T*G*C*C* | 1601 | XOOXXXXXX | ASO1 Malat1 2OMe | Malat1 |
| 2572 | CCAATGCUAG | | A*A*T*mGC*mUmA*mG | | XXXXXXOXOX | 3-1-1-10-1-1-3 PO PS | |
| | | | | | | like version Nenad1 | |
| WV- | GGGUCAGCT | 850 | G*G*mG*mU*mC*A*G*C*T*G*C*C | 1602 | XXXXXXXXX | ASO1 Malat1 2OMe | Malat1 |
| 2574 | GCCAATGCU | | *A*A*T*mG*mC*mU*A*G | | XXXXXXXXX | 2-3-10-3-2 PO PS like | |
| | AG | | | | | version Chandra1 | |
| WV- | GGGUCAGCT | 851 | G*mGmGmUmC*A*G*C*T*G*C*C* | 1603 | XOOOXXXXX | ASO1 Malat1 2OMe | Malat1 |
| 2576 | GCCAATGCU | | A*A*T*mGmCmUmA*G | | XXXXXXOOOX | 1-4-10-4-1 PO PS like | |
| | AG | | | | | version Chandra2 | |
| WV- | GGGTCAGCTG | 852 | Geo*Geo*Geo*Teo*m5Ceo*A*G*C*T | 1604 | XXXXXXXXX | Randomer for WV- | Malat1 |
| 2735 | CCAATGCTAG | | *G*C*C*A*A*T*Geo*m5Ceo*Teo*A | | XXXXXXXXXX | 2526 | |
| | | | eo*Geo | | | | |
| WV- | GGGTCAGCTG | 853 | Geo*Geo*Geo*Teo*Ceo*A*G*C*T*G | 1605 | XXXXXXXXX | Randomer for WV- | Malat1 |
| 2736 | CCAATGCTAG | | *C*C*A*A*T*Geo*Ceo*Teo*Aeo*Geo | | XXXXXXXXXX | 2526 | |
| WV- | GGGUCAGCT | 854 | Mod013L001*mG*mG*mG*mU*mC* | 1606 | OXXXXXXXX | Laurie acid OMe full- | Malat1 |
| 2753 | GCCAATGCU | | A*G*C*T*G*C*C*A*A*T*mG*mC* | | XXXXXXXXX | PS | |
| | AG | | mU*mA*mG | | XXX | | |
| WV- | GGGUCAGCT | 855 | Mod014L001*mG*mG*mG*mU*mC* | 1607 | OXXXXXXXX | Myristic acid OMe | Malat1 |
| 2754 | GCCAATGCU | | A*G*C*T*G*C*C*A*A*T*mG*mC* | | XXXXXXXXX | full-PS | |
| | AG | | mU*mA*mG | | XXX | | |
| WV- | GGGUCAGCT | 856 | Mod005L001*mG*mG*mG*mU*mC* | 1608 | OXXXXXXXX | Palmitic acid OMe | Malat1 |
| 2755 | GCCAATGCU | | A*G*C*T*G*C*C*A*A*T*mG*mC* | | XXXXXXXXX | full-PS | |
| | AG | | mU*mA*mG | | XXX | | |
| WV- | GGGUCAGCT | 857 | Mod015L001*mG*mG*mG*mU*mC* | 1609 | OXXXXXXXX | Stearic acid OMe full- | Malat1 |
| 2756 | GCCAATGCU | | A*G*C*T*G*C*C*A*A*T*mG*mC* | | XXXXXXXXX | PS | |
| | AG | | mU*mA*mG | | XXX | | |
| WV- | GGGUCAGCT | 858 | Mod016L001*mG*mG*mG*mU*mC* | 1610 | OXXXXXXXX | Oleic acid OMe full- | Malat1 |
| 2757 | GCCAATGCU | | A*G*C*T*G*C*C*A*A*T*mG*mC* | | XXXXXXXXX | PS | |
| | AG | | mU*mA*mG | | XXX | | |
| WV- | GGGUCAGCT | 859 | Mod017L001*mG*mG*mG*mU*mC* | 1611 | OXXXXXXXX | Linoleic acid OMe | Malat1 |
| 2758 | GCCAATGCU | | A*G*C*T*G*C*C*A*A*T*mG*mC* | | XXXXXXXXX | full-PS | |
| | AG | | mU*mA*mG | | XXX | | |
| WV- | GGGUCAGCT | 860 | Mod018L001*mG*mG*mG*mU*mC* | 1612 | OXXXXXXXX | alpha-Linolenic acid | Malat1 |
| 2759 | GCCAATGCU | | A*G*C*T*G*C*C*A*A*T*mG*mC* | | XXXXXXXXX | OMe full-PS | |
| | AG | | mU*mA*mG | | XXX | | |
| WV- | GGGUCAGCT | 861 | Mod019L001*mG*mG*mG*mU*mC* | 1613 | OXXXXXXXX | gamma-Linolenic acid | Malat1 |
| 2760 | GCCAATGCU | | A*G*C*T*G*C*C*A*A*T*mG*mC* | | XXXXXXXXX | OMe full-PS | |
| | AG | | mU*mA*mG | | XXX | | |
| WV- | GGGUCAGCT | 862 | Mod006L001*mG*mG*mG*mU*mC* | 1614 | OXXXXXXXX | DHA OMe full-PS | Malat1 |
| 2761 | GCCAATGCU | | A*G*C*T*G*C*C*A*A*T*mG*mC* | | XXXXXXXXX | | |
| | AG | | mU*mA*mG | | XXX | | |
| WV- | GGGUCAGCT | 863 | Mod020L001*mG*mG*mG*mU*mC* | 1615 | OXXXXXXXX | Turbinaric acid OMe | Malat1 |
| 2762 | GCCAATGCU | | A*G*C*T*G*C*C*A*A*T*mG*mC* | | XXXXXXXXX | full-PS | |
| | AG | | mU*mA*mG | | XXX | | |
| WV- | GGGUCAGCT | 864 | Mod021*mG*mG*mG*mU*mC*A*G* | 1616 | XXXXXXXXX | Dilinoleyl alcohol | Malat1 |
| 2763 | GCCAATGCU | | C*T*G*C*C*A*A*T*mG*mC*mU*m | | XXXXXXXXX | OMe full-PS | |
| | AG | | A*mG | | XX | | |
| WV- | GGGUCAGCT | 865 | Mod024L001*mG*mG*mG*mU*mC* | 1617 | XXXXXXXXX | Triantennary GlcNAc | Malat1 |
| 2764 | GCCAATGCU | | A*G*C*T*G*C*C*A*A*T*mG*mC* | | XXXXXXXXX | OMe full-PS | |
| | AG | | mU*mA*mG | | XX | | |
| WV- | GGGUCAGCT | 866 | Mod025L001*mG*mG*mG*mU*mC* | 1618 | XXXXXXXXX | Triantennary beta- | Malat1 |
| 2765 | GCCAATGCU | | A*G*C*T*G*C*C*A*A*T*mG*mC* | | XXXXXXXXX | Mannose OMe full-PS | |
| | AG | | mU*mA*mG | | XX | | |
| WV- | GGGUCAGCT | 867 | Mod026L001*mG*mG*mG*mU*mC* | 1619 | XXXXXXXXX | Triantennary alpha- | Malat1 |
| 2766 | GCCAATGCU | | A*G*C*T*G*C*C*A*A*T*mG*mC* | | XXXXXXXXX | Mannose OMe full-PS | |
| | AG | | mU*mA*mG | | XX | | |
| WV- | GGGUCAGCT | 868 | Mod013L001*mG*mGmGmUmC*A* | 1620 | OXXOOOXXX | Laurie acid OMe | Malat1 |
| 2767 | GCCAATGCU | | G*C*T*G*C*C*A*A*T*mGmCmUm | | XXXXXXXXO | PS\/PO wing | |
| | AG | | A*mG | | OOX | | |
| WV- | GGGUCAGCT | 869 | Mod014L001*mG*mGmGmUmC*A* | 1621 | OXXOOOXXX | Myristic acid OMe | Malat1 |
| 2768 | GCCAATGCU | | G*C*T*G*C*C*A*A*T*mGmCmUm | | XXXXXXXXO | PS\/PO wing | |
| | AG | | A*mG | | OOX | | |
| WV- | GGGUCAGCT | 870 | Mod005L001*mG*mGmGmUmC*A* | 1622 | OXXOOOXXX | Palmitic acid OMe | Malat1 |
| 2769 | GCCAATGCU | | G*C*T*G*C*C*A*A*T*mGmCmUm | | XXXXXXXXO | PS\/PO wing | |
| | AG | | A*mG | | OOX | | |
| WV- | GGGUCAGCT | 871 | Mod015L001*mG*mGmGmUmC*A* | 1623 | OXXOOOXXX | Stearic acid OMe | Malat1 |
| 2770 | GCCAATGCU | | G*C*T*G*C*C*A*A*T*mGmCmUm | | XXXXXXXXO | PS\/PO wing | |
| | AG | | A*mG | | OOX | | |
| WV- | GGGUCAGCT | 872 | Mod016L001*mG*mGmGmUmC*A* | 1624 | OXXOOOXXX | Oleic acid OMe | Malat1 |
| 2771 | GCCAATGCU | | G*C*T*G*C*C*A*A*T*mGmCmUm | | XXXXXXXXO | PS\/PO wing | |
| | AG | | A*mG | | OOX | | |
| WV- | GGGUCAGCT | 873 | Mod017L001*mG*mGmGmUmC*A* | 1625 | OXXOOOXXX | Linoleic acid OMe | Malat1 |
| 2772 | GCCAATGCU | | G*C*T*G*C*C*A*A*T*mGmCmUm | | XXXXXXXXO | PS\/PO wing | |
| | AG | | A*mG | | OOX | | |
| WV- | GGGUCAGCT | 874 | Mod018L001*mG*mGmGmUmC*A* | 1626 | OXXOOOXXX | alpha-Linolenic acid | Malat1 |
| 2773 | GCCAATGCU | | G*C*T*G*C*C*A*A*T*mGmCmUm | | XXXXXXXXO | OMe PS\/PO wing | |
| | AG | | A*mG | | OOX | | |
| WV- | GGGUCAGCT | 875 | Mod019L001*mG*mGmGmUmC*A* | 1627 | OXXOOOXXX | gamma-Linolenic acid | Malat1 |
| 2774 | GCCAATGCU | | G*C*T*G*C*C*A*A*T*mGmCmUm | | XXXXXXXXO | OMe PS\/PO wing | |
| | AG | | A*mG | | OOX | | |
| WV- | GGGUCAGCT | 876 | Mod006L001*mG*mGmGmUmC*A* | 1628 | OXXOOOXXX | DHA OMe PS\/PO | Malat1 |
| 2775 | GCCAATGCU | | G*C*T*G*C*C*A*A*T*mGmCmUm | | XXXXXXXXO | wing | |
| | AG | | A*mG | | OOX | | |
| WV- | GGGUCAGCT | 877 | Mod020L001*mG*mGmGmUmC*A* | 1629 | OXXOOOXXX | Turbinaric acid OMe | Malat1 |
| 2776 | GCCAATGCU | | G*C*T*G*C*C*A*A*T*mGmCmUm | | XXXXXXXXO | PS\/PO wing | |
| | AG | | A*mG | | OOX | | |
| WV- | GGGUCAGCT | 878 | Mod021*mG*mGmGmUmC*A*G*C* | 1630 | XXOOOXXXX | Dilinoleyl alcohol | Malat1 |
| 2777 | GCCAATGCU | | T*G*C*C*A*A*T*mGmCmUmA*mG | | XXXXXXXOO | OMe PS\/PO wing | |
| | AG | | | | | OX | |
| WV- | GGGUCAGCT | 879 | Mod024L001*mG*mGmGmUmC*A* | 1631 | XXOOOXXXX | Triantennary GlcNAc | Malat1 |
| 2778 | GCCAATGCU | | G*C*T*G*C*C*A*A*T*mGmCmUm | | XXXXXXXOO | OMe PS\/PO wing | |
| | AG | | A*mG | | OX | | |
| WV- | GGGUCAGCT | 880 | Mod025L001*mG*mGmGmUmC*A* | 1632 | XXOOOXXXX | Triantennary beta- | Malat1 |
| 2779 | GCCAATGCU | | G*C*T*G*C*C*A*A*T*mGmCmUm | | XXXXXXXOO | Mannose OMe PS\/PO | |
| | AG | | A*mG | | OX | wing | |
| WV- | GGGUCAGCT | 881 | Mod026L001*mG*mGmGmUmC*A* | 1633 | XXOOOXXXX | Triantennary alpha- | Malat1 |
| 2780 | GCCAATGCU | | G*C*T*G*C*C*A*A*T*mGmCmUm | | XXXXXXXOO | Mannose OMe PS\/PO | |
| | AG | | A*mG | | OX | wing | |
| WV- | CUAGCAUUG | 882 | rCrUrArGrCrArUrUrGrGrCrArGrCrUr | 1634 | OOOOOOOOO | complementary RNA | Malat1 |
| 2781 | GCAGCUGAC | | GrArCrCrC | | OOOOOOOOOO | coding Malat1 | |
| | CC | | | | | | |
| WV- | GGGTCAGCTG | 883 | L001*Geo*Geo*Geo*Teo*m5Ceo*A* | 1635 | XXXXXXXXX | C6amine linker MOE | Malat1 |
| 2809 | CCAATGCTAG | | G*C*T*G*C*C*A*A*T*Geo*m5Ceo* | | XXXXXXXXX | full-PS | |
| | | | Teo*Aeo*Geo | | XX | | |
| WV- | GGGUCAGCT | 884 | L001*mG*mG*mG*mU*mC*A*G*C* | 1636 | XXXXXXXXX | C6amine linker OMe | Malat1 |
| 2810 | GCCAATGCU | | T*G*C*C*A*A*T*mG*mC*mU*mA* | | XXXXXXXXX | full-PS | |
| | AG | | mG | | XX | | |
| WV- | GGGUCAGCT | 885 | L001*mG*mGmGmUmC*A*G*C*T* | 1637 | XXOOOXXXX | C6amine linker OMe | Malat1 |
| 2811 | GCCAATGCU | | G*C*C*A*A*T*mGmCmUmA*mG | | XXXXXXXOO | PS\/PO wing | |
| | AG | | | | OX | | |
| WV- | GGGTCAGCTG | 886 | Mod013L001*Geo*Geo*Geo*Teo*m5 | 1638 | OXXXXXXXX | Lauric acid MOE full- | Malat1 |
| 2821 | CCAATGCTAG | | Ceo*A*G*C*T*G*C*C*A*A*T*Geo* | | XXXXXXXXX | PS | |
| | | | m5Ceo*Teo*Aeo*Geo | | XXX | | |
| WV- | GGGTCAGCTG | 887 | Mod014L001*Geo*Geo*Geo*Teo*m5 | 1639 | OXXXXXXXX | Myristic acid MOE | Malat1 |
| 2822 | CCAATGCTAG | | Ceo*A*G*C*T*G*C*C*A*A*T*Geo* | | XXXXXXXXX | full-PS | |
| | | | m5Ceo*Teo*Aeo*Geo | | XXX | | |
| WV- | GGGTCAGCTG | 888 | Mod005L001*Geo*Geo*Geo*Teo*m5 | 1640 | OXXXXXXXX | Palmitic acid MOE | Malat1 |
| 2823 | CCAATGCTAG | | Ceo*A*G*C*T*G*C*C*A*A*T*Geo* | | XXXXXXXXX | full-PS | |
| | | | m5Ceo*Teo*Aeo*Geo | | XXX | | |
| WV- | GGGTCAGCTG | 889 | Mod015L001*Geo*Geo*Geo*Teo*m5 | 1641 | OXXXXXXXX | Stearic acid MOE full- | Malat1 |
| 2824 | CCAATGCTAG | | Ceo*A*G*C*T*G*C*C*A*A*T*Geo* | | XXXXXXXXX | PS | |
| | | | m5Ceo*Teo*Aeo*Geo | | XXX | | |
| WV- | GGGTCAGCTG | 890 | Mod016L001*Geo*Geo*Geo*Teo*m5 | 1642 | OXXXXXXXX | Oleic acid MOE full- | Malat1 |
| 2825 | CCAATGCTAG | | Ceo*A*G*C*T*G*C*C*A*A*T*Geo* | | XXXXXXXXX | PS | |
| | | | m5Ceo*Teo*Aeo*Geo | | XXX | | |
| WV- | GGGTCAGCTG | 891 | Mod017L001*Geo*Geo*Geo*Teo*m5 | 1643 | OXXXXXXXX | Linoleic acid MOE | Malat1 |
| 2826 | CCAATGCTAG | | Ceo*A*G*C*T*G*C*C*A*A*T*Geo* | | XXXXXXXXX | full-PS | |
| | | | m5Ceo*Teo*Aeo*Geo | | XXX | | |
| WV- | GGGTCAGCTG | 892 | Mod018L001*Geo*Geo*Geo*Teo*m5 | 1644 | OXXXXXXXX | alpha-Linolenic acid | Malat1 |
| 2827 | CCAATGCTAG | | Ceo*A*G*C*T*G*C*C*A*A*T*Geo* | | XXXXXXXXX | MOE full-PS | |
| | | | m5Ceo*Teo*Aeo*Geo | | XXX | | |
| WV- | GGGTCAGCTG | 893 | Mod019L001*Geo*Geo*Geo*Teo*m5 | 1645 | OXXXXXXXX | gamma-Linolenic acid | Malat1 |
| 2828 | CCAATGCTAG | | Ceo*A*G*C*T*G*C*C*A*A*T*Geo* | | XXXXXXXXX | MOE full-PS | |
| | | | m5Ceo*Teo*Aeo*Geo | | XXX | | |
| WV- | GGGTCAGCTG | 894 | Mod006L001*Geo*Geo*Geo*Teo*m5 | 1646 | OXXXXXXXX | DHA MOE full-PS | Malat1 |
| 2829 | CCAATGCTAG | | Ceo*A*G*C*T*G*C*C*A*A*T*Geo* | | XXXXXXXXX | | |
| | | | m5Ceo*Teo*Aeo*Geo | | XXX | | |
| WV- | GGGTCAGCTG | 895 | Mod020L001*Geo*Geo*Geo*Teo*m5 | 1647 | OXXXXXXXX | Turbinaric acid MOE | Malat1 |
| 2830 | CCAATGCTAG | | Ceo*A*G*C*T*G*C*C*A*A*T*Geo* | | XXXXXXXXX | full-PS | |
| | | | m5Ceo*Teo*Aeo*Geo | | XXX | | |
| WV- | GGGTCAGCTG | 896 | Mod021*Geo*Geo*Geo*Teo*m5Ceo* | 1648 | XXXXXXXXX | Dilinoleyl alcohol | Malat1 |
| 2831 | CCAATGCTAG | | A*G*C*T*G*C*C*A*A*T*Geo*m5C | | XXXXXXXXX | MOE full-PS | |
| | | | eo*Teo*Aeo*Geo | | XX | | |
| WV- | GGGTCAGCTG | 897 | Mod024L001*Geo*Geo*Geo*Teo*m5 | 1649 | XXXXXXXXX | Triantennary GlcNAc | Malat1 |
| 2832 | CCAATGCTAG | | Ceo*A*G*C*T*G*C*C*A*A*T*Geo* | | XXXXXXXXX | MOE full-PS | |
| | | | m5Ceo*Teo*Aeo*Geo | | XX | | |
| WV- | GGGTCAGCTG | 898 | Mod025L001*Geo*Geo*Geo*Teo*m5 | 1650 | XXXXXXXXX | Triantennary beta- | Malat1 |
| 2833 | CCAATGCTAG | | Ceo*A*G*C*T*G*C*C*A*A*T*Geo* | | XXXXXXXXX | Mannose MOE full-PS | |
| | | | m5Ceo*Teo*Aeo*Geo | | XX | | |
| WV- | GGGTCAGCTG | 899 | Mod026L001*Geo*Geo*Geo*Teo*m5 | 1651 | XXXXXXXXX | Triantennary alpha- | Malat1 |
| 2834 | CCAATGCTAG | | Ceo*A*G*C*T*G*C*C*A*A*T*Geo* | | XXXXXXXXX | Mannose MOE full-PS | |
| | | | m5Ceo*Teo*Aeo*Geo | | XX | | |
| WV- | GGGTCAGCTG | 900 | Mod027L001*Geo*Geo*Geo*Teo*m5 | 1652 | XXXXXXXXX | sulfonamide MOE | Malat1 |
| 2835 | CCAATGCTAG | | Ceo*A*G*C*T*G*C*C*A*A*T*Geo* | | XXXXXXXXX | full-PS | |
| | | | m5Ceo*Teo*Aeo*Geo | | XX | | |
| WV- | GGGTCAGCTG | 901 | Mod028L001*Geo*Geo*Geo*Teo*m5 | 1653 | XXXXXXXXX | sulfonamide | Malat1 |
| 2836 | CCAATGCTAG | | Ceo*A*G*C*T*G*C*C*A*A*T*Geo* | | XXXXXXXXX | alkylchain MOE full- | |
| | | | m5Ceo*Teo*Aeo*Geo | | XX | PS | |
| WV- | GGGTCAGCTG | 902 | Mod015L001*Geo*Geo*Geo*Teo*m5 | 1654 | OXXXXXXXX | Stearic acid and | Malat1 |
| 3062 | CCAATGCTAG | | Ceo*A*G*C*T*G*C*C*A*A*T*Geo* | | XXXXXXXXX | GlucNAc, MOE, full- | |
| | | | m5Ceo*Teo*Aeo*Geo*L004Mod024 | | XXX | PS | |
| WV- | GGGTCAGCTG | 903 | Mod019L001*Geo*Geo*Geo*Teo*m5 | 1655 | OXXXXXXXX | gamma-Linolenic acid | Malat1 |
| 3063 | CCAATGCTAG | | Ceo*A*G*C*T*G*C*C*A*A*T*Geo* | | XXXXXXXXX | and GlucNAc, MOE, | |
| | | | m5Ceo*Teo*Aeo*Geo*L004Mod024 | | XXX | full-PS | |
| WV- | GGGTCAGCTG | 904 | Mod020L001*Geo*Geo*Geo*Teo*m5 | 1656 | OXXXXXXXX | Turbinaric acid and | Malat1 |
| 3064 | CCAATGCTAG | | Ceo*A*G*C*T*G*C*C*A*A*T*Geo* | | XXXXXXXXX | GlucNAc, MOE, full- | |
| | | | m5Ceo*Teo*Aeo*Geo*L004Mod024 | | XXX | PS | |
| WV- | GGGTCAGCTG | 905 | Mod015L001*Geo*Geo*Geo*Teo*m5 | 1657 | OXXXXXXXX | Stearic acid and | Malat1 |
| 3065 | CCAATGCTAG | | Ceo*A*G*C*T*G*C*C*A*A*T*Geo* | | XXXXXXXXX | Mannose, MOE, full- | |
| | | | m5Ceo*Teo*Aeo*Geo*L004Mod026 | | XXX | PS | |
| WV- | GGGTCAGCTG | 906 | Mod019L001*Geo*Geo*Geo*Teo*m5 | 1658 | OXXXXXXXX | gamma-Linolenic acid | Malat1 |
| 3066 | CCAATGCTAG | | Ceo*A*G*C*T*G*C*C*A*A*T*Geo* | | XXXXXXXXX | and Mannose, MOE, | |
| | | | m5Ceo*Teo*Aeo*Geo*L004Mod026 | | XXX | full-PS | |
| WV- | GGGTCAGCTG | 907 | Mod020L001*Geo*Geo*Geo*Teo*m5 | 1659 | OXXXXXXXX | Turbinaric acid and | Malat1 |
| 3067 | CCAATGCTAG | | Ceo*A*G*C*T*G*C*C*A*A*T*Geo* | | XXXXXXXXX | Mannose, MOE, full- | |
| | | | m5Ceo*Teo*Aeo*Geo*L004Mod026 | | XXX | PS | |
| WV- | UAGCGCCCA | 908 | mU*mA*mG*mC*mG*C*C*C*A*C* | 1660 | XXXXXXXXX | 20mers, Full PS, 5-10- | Malat1 |
| 3154 | CCTCACCCCUC | | C*T*C*A*C*mC*mC*mC*mU*mC | | XXXXXXXXXX | 5 2′OMe gapmers | |
| WV- | UUAGCGCCC | 909 | mU*mU*mA*mG*mC*G*C*C*C*A* | 1661 | XXXXXXXXX | 20mers, Full PS, 5-10- | Malat1 |
| 3155 | ACCTCACCCCU | | C*C*T*C*A*mC*mC*mC*mC*mU | | XXXXXXXXXX | 5 2′OMe gapmers | |
| WV- | CUUAGCGCC | 910 | mC*mU*mU*mA*mG*C*G*C*C*C* | 1662 | XXXXXXXXX | 20mers, Full PS, 5-10- | Malat1 |
| 3156 | CACCTCACCCC | | A*C*C*T*C*mA*mC*mC*mC*mC | | XXXXXXXXXX | 5 2′OMe gapmers | |
| WV- | ACCCCGTCCT | 911 | mA*mC*mC*mC*mC*G*T*C*C*T*G | 1663 | XXXXXXXXX | 20mers, Full PS, 5-10- | Malat1 |
| 3157 | GGAAACCAGG | | *G*A*A*A*mC*mC*mA*mG*mG | | XXXXXXXXXX | 5 2′OMe gapmers | |
| WV- | CCCCGTCCTG | 912 | mC*mC*mC*mC*mG*T*C*C*T*G*G | 1664 | XXXXXXXXX | 20mers, Full PS, 5-10- | Malat1 |
| 3158 | GAAACCAGGA | | *A*A*A*C*mC*mA*mG*mG*mA | | XXXXXXXXXX | 5 2′OMe gapmers | |
| WV- | GCUUAGCGC | 913 | mG*mC*mU*mU*mA*G*C*G*C*C* | 1665 | XXXXXXXXX | 20mers, Full PS, 5-10- | Malat1 |
| 3159 | CCACCTCACCC | | C*A*C*C*T*mC*mA*mC*mC*mC | | XXXXXXXXXX | 5 2′OMe gapmers | |
| WV- | GGCUUAGCG | 914 | mG*mG*mC*mU*mU*A*G*C*G*C* | 1666 | XXXXXXXXX | 20mers, Full PS, 5-10- | Malat1 |
| 3160 | CCCACCUCACC | | C*C*A*C*C*mU*mC*mA*mC*mC | | XXXXXXXXXX | 5 2′OMe gapmers | |
| WV- | CCCGUCCTGG | 915 | mC*mC*mC*mG*mU*C*C*T*G*G* | 1667 | XXXXXXXXX | 20mers, Full PS, 5-10- | Malat1 |
| 3161 | AAACCAGGAG | | A*A*A*C*C*mA*mG*mG*mA*mG | | XXXXXXXXXX | 5 2′OMe gapmers | |
| WV- | UGAACCCCGT | 916 | mU*mG*mA*mA*mC*C*C*C*G*T* | 1668 | XXXXXXXXX | 20mers, Full PS, 5-10- | Malat1 |
| 3162 | CCTGGAAACC | | C*C*T*G*G*mA*mA*mA*mC*mC | | XXXXXXXXXX | 5 2′OMe gapmers | |
| WV- | UUUCCCCTCC | 917 | mU*mU*mU*mC*mC*C*C*T*C*C*C | 1669 | XXXXXXXXX | 20mers, Full PS, 5-10- | Malat1 |
| 3163 | CTCATCAACA | | *T*C*A*T*mC*mA*mA*mC*mA | | XXXXXXXXXX | 5 2′OMe gapmers | |
| WV- | AGCUCCAGTC | 918 | mA*mG*mC*mU*mC*C*A*G*T*C* | 1670 | XXXXXXXXX | 20mers, Full PS, 5-10- | Malat1 |
| 3164 | CCTGAAGGUG | | C*C*T*G*A*mA*mG*mG*mU*mG | | XXXXXXXXXX | 5 2′OMe gapmers | |
| WV- | AGGCUTAGC | 919 | mA*mG*mG*mC*mU*T*A*G*C*G* | 1671 | XXXXXXXXX | 20mers, Full PS, 5-10- | Malat1 |
| 3165 | GCCCACCUCAC | | C*C*C*A*C*mC*mU*mC*mA*mC | | XXXXXXXXXX | 5 2′OMe gapmers | |
| WV- | GUUUCCCCTC | 920 | mG*mU*mU*mU*mC*C*C*C*T*C* | 1672 | XXXXXXXXX | 20mers, Full PS, 5-10- | Malat1 |
| 3166 | CCTCAUCAAC | | C*C*T*C*A*mU*mC*mA*mA*mC | | XXXXXXXXXX | 5 2′OMe gapmers | |
| WV- | AACCCCGTCC | 921 | mA*mA*mC*mC*mC*C*G*T*C*C*T | 1673 | XXXXXXXXX | 20mers, Full PS, 5-10- | Malat1 |
| 3167 | TGGAAACCAG | | *G*G*A*A*mA*mC*mC*mA*mG | | XXXXXXXXXX | 5 2′OMe gapmers | |
| WV- | GAACCCCGTC | 922 | mG*mA*mA*mC*mC*C*C*G*T*C* | 1674 | XXXXXXXXX | 20mers, Full PS, 5-10- | Malat1 |
| 3168 | CTGGAAACCA | | C*T*G*G*A*mA*mA*mC*mC*mA | | XXXXXXXXXX | 5 2′OMe gapmers | |
| WV- | GCUCCAGTCC | 923 | mG*mC*mU*mC*mC*A*G*T*C*C* | 1675 | XXXXXXXXX | 20mers, Full PS, 5-10- | Malat1 |
| 3169 | CTGAAGGUGU | | C*T*G*A*A*mG*mG*mU*mG*mU | | XXXXXXXXXX | 5 2′OMe gapmers | |
| WV- | UUGAACCCC | 924 | mU*mU*mG*mA*mA*C*C*C*C*G* | 1676 | XXXXXXXXX | 20mers, Full PS, 5-10- | Malat1 |
| 3170 | GTCCTGGAAAC | | T*C*C*T*G*mG*mA*mA*mA*mC | | XXXXXXXXXX | 5 2′OMe gapmers | |
| WV- | UUCCCCTCCC | 925 | mU*mU*mC*mC*mC*C*T*C*C*C*T | 1677 | XXXXXXXXX | 20mers, Full PS, 5-10- | Malat1 |
| 3171 | TCATCAACAA | | *C*A*T*C*mA*mA*mC*mA*mA | | XXXXXXXXXX | 5 2′OMe gapmers | |
| WV- | CCGUCCTGGA | 926 | mC*mC*mG*mU*mC*C*T*G*G*A* | 1678 | XXXXXXXXX | 20mers, Full PS, 5-10- | Malat1 |
| 3172 | AACCAGGAGU | | A*A*C*C*A*mG*mG*mA*mG*mU | | XXXXXXXXXX | 5 2′OMe gapmers | |
| WV- | GCAGCTCCAG | 927 | mG*mC*mA*mG*mC*T*C*C*A*G* | 1679 | XXXXXXXXX | 20mers, Full PS, 5-10- | Malat1 |
| 3173 | TCCCTGAAGG | | T*C*C*C*T*mG*mA*mA*mG*mG | | XXXXXXXXXX | 5 2′OMe gapmers | |
| WV- | UGCCAGGCT | 928 | mU*mG*mC*mC*mA*G*G*C*T*G* | 1680 | XXXXXXXXX | 20mers, Full PS, 5-10- | Malat1 |
| 3174 | GGTTATGACUC | | G*T*T*A*T*mG*mA*mC*mU*mC | | XXXXXXXXXX | 5 2′OMe gapmers | |
| WV- | CGUCCTGGA | 929 | mC*mG*mU*mC*mC*T*G*G*A*A* | 1681 | XXXXXXXXX | 20mers, Full PS, 5-10- | Malat1 |
| 3175 | AACCAGGAG | | A*C*C*A*G*mG*mA*mG*mU*mG | | XXXXXXXXXX | 5 2′OMe gapmers | |
| | UG | | | | | | |
| WV- | CAGCUCCAGT | 930 | mC*mA*mG*mC*mU*C*C*A*G*T* | 1682 | XXXXXXXXX | 20mers, Full PS, 5-10- | Malat1 |
| 3176 | CCCTGAAGGU | | C*C*C*T*G*mA*mA*mG*mG*mU | | XXXXXXXXXX | 5 2′OMe gapmers | |
| WV- | CUGCCAGGCT | 931 | mC*mU*mG*mC*mC*A*G*G*C*T* | 1683 | XXXXXXXXX | 20mers, Full PS, 5-10- | Malat1 |
| 3177 | GGTTAUGACU | | G*G*T*T*A*mU*mG*mA*mC*mU | | XXXXXXXXXX | 5 2′OMe gapmers | |
| WV- | UCCUGGAAA | 932 | mU*mC*mC*mU*mG*G*A*A*A*C* | 1684 | XXXXXXXXX | 20mers, Full PS, 5-10- | Malat1 |
| 3178 | CCAGGAGUG | | C*A*G*G*A*mG*mU*mG*mC*mC | | XXXXXXXXXX | 5 2′OMe gapmers | |
| | CC | | | | | | |
| WV- | AAGGCTTAGC | 933 | mA*mA*mG*mG*mC*T*T*A*G*C* | 1685 | XXXXXXXXX | 20mers, Full PS, 5-10- | Malat1 |
| 3179 | GCCCACCUCA | | G*C*C*C*A*mC*mC*mU*mC*mA | | XXXXXXXXXX | 5 2′OMe gapmers | |
| WV- | CCAGGCTGGT | 934 | mC*mC*mA*mG*mG*C*T*G*G*T*T | 1686 | XXXXXXXXX | 20mers, Full PS, 5-10- | Malat1 |
| 3180 | TATGACUCAG | | *A*T*G*A*mC*mU*mC*mA*mG | | XXXXXXXXXX | 5 2′OMe gapmers | |
| WV- | CCUGGAAAC | 935 | mC*mC*mU*mG*mG*A*A*A*C*C* | 1687 | XXXXXXXXX | 20mers, Full PS, 5-10- | Malat1 |
| 3181 | CAGGAGUGC | | A*G*G*A*G*mU*mG*mC*mC*mA | | XXXXXXXXXX | 5 2′OMe gapmers | |
| | CA | | | | | | |
| WV- | GCCAGGCTG | 936 | mG*mC*mC*mA*mG*G*C*T*G*G* | 1688 | XXXXXXXXX | 20mers, Full PS, 5-10- | Malat1 |
| 3182 | GTTATGACUCA | | T*T*A*T*G*mA*mC*mU*mC*mA | | XXXXXXXXXX | 5 2′OMe gapmers | |
| WV- | AAAGGCTTA | 937 | mA*mA*mA*mG*mG*C*T*T*A*G* | 1689 | XXXXXXXXX | 20mers, Full PS, 5-10- | Malat1 |
| 3183 | GCGCCCACCUC | | C*G*C*C*C*mA*mC*mC*mU*mC | | XXXXXXXXXX | 5 2′OMe gapmers | |
| WV- | GGAUUGGGA | 938 | mG*mG*mA*mU*mU*G*G*G*A*G* | 1690 | XXXXXXXXX | 20mers, Full PS, 5-10- | Malat1 |
| 3184 | GTTACTUGCCA | | T*T*A*C*T*mU*mG*mC*mC*mA | | XXXXXXXXXX | 5 2′OMe gapmers | |
| WV- | GUCCUGGAA | 939 | mG*mU*mC*mC*mU*G*G*A*A*A* | 1691 | XXXXXXXXX | 20mers, Full PS, 5-10- | Malat1 |
| 3185 | ACCAGGAGU | | C*C*A*G*G*mA*mG*mU*mG*mC | | XXXXXXXXXX | 5 2′OMe gapmers | |
| | GC | | | | | | |
| WV- | CAGGCTGGTT | 940 | mC*mA*mG*mG*mC*T*G*G*T*T* | 1692 | XXXXXXXXX | 20mers, Full PS, 5-10- | Malat1 |
| 3186 | ATGACUCAGA | | A*T*G*A*C*mU*mC*mA*mG*mA | | XXXXXXXXXX | 5 2′OMe gapmers | |
| WV- | GGGAGTTACT | 941 | mG*mG*mG*mA*mG*T*T*A*C*T*T | 1693 | XXXXXXXXX | 20mers, Full PS, 5-10- | Malat1 |
| 3187 | TGCCAACUUG | | *G*C*C*A*mA*mC*mU*mU*mG | | XXXXXXXXXX | 5 2′OMe gapmers | |
| WV- | UGGGAGTTA | 942 | mU*mG*mG*mG*mA*G*T*T*A*C* | 1694 | XXXXXXXXX | 20mers, Full PS, 5-10- | Malat1 |
| 3188 | CTTGCCAACUU | | T*T*G*C*C*mA*mA*mC*mU*mU | | XXXXXXXXXX | 5 2′OMe gapmers | |
| WV- | UUGGGAGTT | 943 | mU*mU*mG*mG*mG*A*G*T*T*A* | 1695 | XXXXXXXXX | 20mers, Full PS, 5-10- | Malat1 |
| 3189 | ACTTGCCAACU | | C*T*T*G*C*mC*mA*mA*mC*mU | | XXXXXXXXXX | 5 2′OMe gapmers | |
| WV- | AUUUCCTCA | 944 | mA*mU*mU*mU*mC*C*T*C*A*A* | 1696 | XXXXXXXXX | 20mers, Full PS, 5-10- | Malat1 |
| 3190 | ACACTCAGCCU | | C*A*C*T*C*mA*mG*mC*mC*mU | | XXXXXXXXXX | 5 2′OMe gapmers | |
| WV- | CCCCUCCCTC | 945 | mC*mC*mC*mC*mU*C*C*C*T*C*A | 1697 | XXXXXXXXX | 20mers, Full PS, 5-10- | Malat1 |
| 3191 | ATCAACAAAA | | *T*C*A*A*mC*mA*mA*mA*mA | | XXXXXXXXXX | 5 2′OMe gapmers | |
| WV- | ACAUUTCCAC | 946 | mA*mC*mA*mU*mU*T*C*C*A*C* | 1698 | XXXXXXXXX | 20mers, Full PS, 5-10- | Malat1 |
| 3192 | TTGCCAGUUA | | T*T*G*C*C*mA*mG*mU*mU*mA | | XXXXXXXXXX | 5 2′OMe gapmers | |
| WV- | AAAAGGCTT | 947 | mA*mA*mA*mA*mG*G*C*T*T*A* | 1699 | XXXXXXXXX | 20mers, Full PS, 5-10- | Malat1 |
| 3193 | AGCGCCCACCU | | G*C*G*C*C*mC*mA*mC*mC*mU | | XXXXXXXXXX | 5 2′OMe gapmers | |
| WV- | ACCUGTCTGA | 948 | mA*mC*mC*mU*mG*T*C*T*G*A* | 1700 | XXXXXXXXX | 20mers, Full PS, 5-10- | Malat1 |
| 3194 | GGCAAACGAA | | G*G*C*A*A*mA*mC*mG*mA*mA | | XXXXXXXXXX | 5 2′OMe gapmers | |
| WV- | AUUGGGAGT | 949 | mA*mU*mU*mG*mG*G*A*G*T*T* | 1701 | XXXXXXXXX | 20mers, Full PS, 5-10- | Malat1 |
| 3195 | TACTTGCCAAC | | A*C*T*T*G*mC*mC*mA*mA*mC | | XXXXXXXXXX | 5 2′OMe gapmers | |
| WV- | UCAACAAAA | 950 | mU*mC*mA*mA*mC*A*A*A*A*G* | 1702 | XXXXXXXXX | 20mers, Full PS, 5-10- | Malat1 |
| 3196 | GCCCACCCUCU | | C*C*C*A*C*mC*mC*mU*mC*mU | | XXXXXXXXXX | 5 2′OMe gapmers | |
| WV- | CUAAGATGCT | 951 | mC*mU*mA*mA*mG*A*T*G*C*T* | 1703 | XXXXXXXXX | 20mers, Full PS, 5-10- | Malat1 |
| 3197 | AGCTTGGCCA | | A*G*C*T*T*mG*mG*mC*mC*mA | | XXXXXXXXXX | 5 2′OMe gapmers | |
| WV- | GGGTCAGCTG | 952 | L001Geo*Geo*Geo*Teo*m5Ceo*A*G | 1704 | OXXXXXXXX | C6 amine PO linker, | Malat1 |
| 3356 | CCAATGCTAG | | *C*T*G*C*C*A*A*T*Geo*m5Ceo*T | | XXXXXXXXX | MOE, full-PS | |
| | | | eo*Aeo*Geo | | XX | | |
| WV- | GGGTCAGCTG | 953 | Mod030Geo*Geo*Geo*Teo*m5Ceo*A | 1705 | OXXXXXXXX | WV-2735 based; with | Malat1 |
| 3521 | CCAATGCTAG | | *G*C*T*G*C*C*A*A*T*Geo*m5Ceo | | XXXXXXXXX | PO linker, Laurie acid | |
| | | | *Teo*Aeo*Geo | | XX | | |
| WV- | GGGTCAGCTG | 954 | Mod031Geo*Geo*Geo*Teo*m5Ceo*A | 1706 | OXXXXXXXX | WV-2735 based; with | Malat1 |
| 3522 | CCAATGCTAG | | *G*C*T*G*C*C*A*A*T*Geo*m5Ceo | | XXXXXXXXX | PO inker, Myristic | |
| | | | *Teo*Aeo*Geo | | XX | acid | |
| WV- | GGGTCAGCTG | 955 | Mod032Geo*Geo*Geo*Teo*m5Ceo*A | 1707 | OXXXXXXXX | WV-2735 based; with | Malat1 |
| 3523 | CCAATGCTAG | | *G*C*T*G*C*C*A*A*T*Geo*m5Ceo | | XXXXXXXXX | PO linker, Palmitic | |
| | | | *Teo*Aeo*Geo | | XX | acid | |
| WV- | GGGTCAGCTG | 956 | Mod033Geo*Geo*Geo*Teo*m5Ceo*A | 1708 | OXXXXXXXX | WV-2735 based; with | Malat1 |
| 3524 | CCAATGCTAG | | *G*C*T*G*C*C*A*A*T*Geo*m5Ceo | | XXXXXXXXX | PO linker, Stearic acid | |
| | | | *Teo*Aeo*Geo | | XX | | |

¹Including —C(O)— (noted as O) connecting Mod and the amino group of C6 amino linker and phosphate or phosphorothioate linkage connecting C6 amino linker and oligonucleotide chain (noted as X (stereorandom), S (Sp) or R (Sp)).
Abbreviations:
2\′: 2′
5Ceo: 5-Methyl 2′-Methoxyethyl C
C6: C6 amino linker (L001, —NH—(CH₂)₆— wherein —NH— is connected to Mod (through —C(O)—) or —H, and —(CH₂)₆— is connected to the 5′-end of oligonucleotide chain through, e.g., phosphodiester (illustrated in the Table as O or PO), phosphorothioate (illustrated in the Table as * if the phosphorothioate not chirally controlled; *S, S, or Sp, if chirally controlled and has an Sp configuration, and *R, R, or Rp, if chirally controlled and has an Rp configuration), or phosphorodithioate (illustrated in the Table as PS2 or :). May also be referred to as C6 linker or C6 amine linker)
eo: 2′-MOE
Exon: Exon of Dystrophin
F, f: 2′-F
Lauric (in Mod013), Myristic (in Mod014), Palmitic (in Mod005), Stearic (in Mod015), Oleic (in Mod016), Linoleic (in Mod017), alpha-Linoleinc (in Mod018), gamma-Linolenic (in Mod019), DHA (in Mod006), Turbinaric (in Mod020), Dilinoleic (in Mod021), TriGlcNAc (in Mod024), TrialphaMannose (in Mod026), MonoSulfonamide (in Mod 027), TriSulfonamide (in Mod029), Lauric (in Mod030), Myristic (in Mod031), Palmitic (in Mod032), and Stearic (in Mod033): Lauric acid (for Mod013), Myristic acid (for Mod014), Palmitic acid (for Mod005), Stearic acid (for Mod015), Oleic acid (for Mod016), Linoleic acid (for Mod017), alpha-Linolenic acid (for Mod018), gamma-Linolenic acid (for Mod019), docosahexaenoic acid (for Mod006), Turbinaric acid (for Mod020), alcohol for Dilinoleyl (for Mod021), acid for TriGlcNAc (for Mod024), acid for TrialphaMannose (for Mod026), acid for MonoSulfonamide (for Mod 027), acid for TriSulfonamide (for Mod029), Lauryl alcohol (for Mod030), Myristyl alcohol (for Mod031), Palmityl alcohol (for Mod032), and Stearyl alcohol (for Mod033), respectively, conjugated to oligonucleotide chains through amide groups, C6 amino linker, phosphodiester linkage (PO), and/or phosphorothioate linkage (PS): Mod013 (Lauric acid with C6 amino linker and PO or PS), Mod014 (Myristic acid with C6 amino linker and PO or PS), Mod005 (Palmitic acid with C6 amino linker and PO or PS), Mod015 (Stearic acid with C6 amino linker and PO or PS), Mod016 (Oleic acid with C6 amino linker and PO or PS), Mod017 (Linoleic acid with C6 amino linker and PO or PS), Mod018 (alpha-Linolenic acid with C6 amino linker and PO or PS), Mod019 (gamma-Linolenic acid with C6 amino linker and PO or PS), Mod006 (DHA with C6 amino linker and PO or PS), Mod020 (Turbinaric acid with C6 amino linker and PO or PS), Mod021 (alcohol (see below) with PO or PS), Mod024 (acid (see below) with C6 amino linker and PO or PS), Mod026 (acid (see below) with C6 amino linker and PO or PS), Mod027 (acid (see below) with C6 amino linker and PO or PS), Mod029 (acid (see below) with C6 amino linker and PO or PS), Mod030 (Lauryl alcohol with PO or PS), Mod031 (Myristyl alcohol with PO or PS), Mod032 (Palmityl alcohol with PO or PS), and Mod033 (Stearyl alcohol with PO or PS), with PO or PS for each oligonucleotide indicated in the Table (for example, WV-3473 Lauric acid conjugated to oligonucleotide chain of WV-3473 via amide group, C6, and PO:
Mod013L001fU*SfC*SfA*SfA*SfG*SfG*SmAfA*SmGmA*SfU*SmGmGfC*SfA*SfU*SfU*SfU*SfC*SfU (SEQ ID NO: 1709) (Description), OOSSSSSSOSOSSOOSSSSSS (Stereochemistry), and/or WV-3473, Lauric acid, C6 PO linker (Notes); WV-3557 Steary alcohol conjugated to oligonucleotide chain of WV-3473 via PS:
Mod033*fU*SfC*SfA*SfA*SfG*SfG*SmAfA*SmGmA*SfU*SmGmGfC*SfA*SfU*SfU*SfU*SfC*SfU (SEQ ID NO: 1710) (Description), XSSSSSSOSOSSOOSSSSSS (Stereochemistry), and/or WV-3473, Stearic PS (Notes); and WV-4106 Stearic acid conjugated to oligonucleotide chain of WV-3473 via amide group, C6, and PS:
Mod015L001*fU*SfC*SfA*SfA*SfG*SfG*SmAfA*SmGmA*SfU*SmGmGfC*SfA*SfU*SfU*SfU*SfC*SfU (SEQ ID NO: 1711) (Description), OXSSSSSSOSOSSOOSSSSSS (Stereochemistry), and/or WV-3473, C6 PS linker, Stearic acid (Notes)) Moieties for conjugation, and example reagents (many of which were previously known and are commercially available or can be readily prepared using known technologies in accordance with the present disclosure, e.g., Lauric acid (for Mod013), Myristic acid (for Mod014), Palmitic acid (for Mod005), Stearic acid (for Mod015), Oleic acid (for Mod016), Linoleic acid (for Mod017), alpha-Linolenic acid (for Mod018), gamma-Linolenic acid (for Mod019), docosahexaenoic acid (for Mod006), Turbinaric acid (for Mod020), alcohol for Dilinoleyl (for Mod021), Lauryl alcohol (for Mod030), Myristyl alcohol (for Mod031), Palmityl alcohol (for Mod032), Stearyl alcohol (for Mod033), etc.) are listed below
m: 2′-OMe.
NA: Not Applicable; this term is generally used for negative controls
OMe: 2′-OMe
O, PO: phoshodiester (phosphate), or when used with Mod and L001, — C(O)— connecting Mod and L001, for example,
Mod013L001fU*SfC*SfA*SfA*SfG*SfG*SmAfA*SmGmA*SfU*SmGmGfC*SfA*SfU*SfU*SfU*SfC*SfU (SEQ ID NO: 1709) (Description), OOSSSSSSOSOSSOOSSSSSS (Stereochemistry) and/or WV-3473, Lauric acid, C6 PO linker (Notes). Note the second O OOSSSSSSOSOSSOOSSSSSS (Stereochemistry) represents phosphodiester linkage connecting L001 and 5′—O— of oligonucleotide chain: Mod013L001fU*SfC*SfA*SfA*SfG*SfG*SmAfA*SmGmA*SfU*SmGmGfC*SfA*SfU*SfU*SfU*SfC*SfU (SEQ ID NO: 1709))
*, PS: Phosphorothioate
PS2, :: phosphorodithioate (e.g., WV-3078, wherein a colon (:) indicates a phosphorodithioate)
*R, R, Rp: Phosphorothioate in Rp conformation
*S, S, Sp: Phosphorothioate in Sp conformation
WV, W V-: WV-
X: Phosphorothioate stereorandom

Example moieties (e.g., lipid moieties, targeting component, etc.) and example preparation reagents (e.g., acids, alcohols, etc.) for conjugation to prepare provided oligonucleotides, e.g., example oligonucleotides in Tables 1-4 comprising such moieties, in accordance with the present disclosure include the below:
Mod005 (with —C(O)— connecting to —NH— of L001) and Palmitic acid

[chemical structure]

Mod005L001 (with PO or PS connecting to 5′-O— of oligonucleotide chain)

[chemical structure]

Mod006 (with —C(O)— connecting to —NH— of L001) and DHA

[chemical structure]

Mod006L001 (with PO or PS connecting to 5′-O— of oligonucleotide chain)

[chemical structure]

Mod013 (with —C(O)— connecting to —NH— of L001) and Lauric acid

[chemical structure]

Mod013L001 (with PO or PS connecting to 5′-O— of oligonucleotide chain)

[chemical structure]

Mod014 (with —C(O)— connecting to —NH— of L001) and Myristic acid

[chemical structure]

Mod014L001 (with PO or PS connecting to 5′-O— of oligonucleotide chain)

[chemical structure]

Mod015 (with —C(O)— connecting to —NH— of L001) and Stearic acid

[chemical structure]

Mod015L001 (with PO or PS connecting to 5′-O— of oligonucleotide chain)

[chemical structure]

Mod016 (with —C(O)— connecting to —NH— of L001) and Oleic acid

[chemical structure]

Mod016L001 (with PO or PS connecting to 5′-O— of oligonucleotide chain)

[chemical structure]

Mod017 (with —C(O)— connecting to —NH— of L001) and Linoleic acid

[chemical structure]

Mod 017L001 (with PO or PS connecting to 5′-O— of oligonucleotide chain)

[chemical structure]

Mod018 (with —C(O)— connecting to —NH— of L001) and alpha-Linolenic acid

[chemical structure]

Mod018L001 (with PO or PS connecting to 5′-O— of oligonucleotide chain)

[chemical structure]

Mod019 (with —C(O)— connecting to —NH— of L001) and gamma-Linolenic acid

[chemical structure]

Mod019L001 (with PO or PS connecting to 5′-O— of oligonucleotide chain)

[chemical structure]

Mod020 (with —C(O)— connecting to —NH— of L001) and Turbinaric acid

[chemical structure]

Mod020L001 (with PO or PS connecting to 5′-O— of oligonucleotide chain)

[chemical structure]

Mod021 (with PO or PS connecting to 5′-O— of oligonucleotide chain) and alcohol

[chemical structure]

Mod024 (with —C(O)— connecting to —NH— of L001) and acid

[chemical structure]

Mod024L001 (with PO or PS connecting to 5′-O— of oligonucleotide chain)

[chemical structure]

Mod026 (with —C(O)— connecting to —NH— of L0001) and acid

[chemical structure]

Mod026L001 (with PO or PS connecting to 5′-O— of oligonucleotide chain)

[chemical structure]

Mod027 (with —C(O)— connecting to —NH— of L001) and acid

[chemical structure]

Mod027L001 (with PO or PS connecting to 5′-O— of oligonucleotide chain)

[chemical structure]

Mod029 (with —C(O)— connecting to —NH— of L001) and acid

[chemical structure]

Mod029L001 (with PO or PS connecting to 5′-O— of oligonucleotide chain)

[chemical structure]

Mod030 (with PO or PS connecting to 5′-O— of oligonucleotide chain) and Lauryl alcohol

[chemical structure]

Mod031 (with PO or PS connecting to 5′-O— of oligonucleotide chain) and Myristyl alcohol

[chemical structure]

Mod032 (with PO or PS connecting to 5′-O— of oligonucleotide chain) and Palmityl alcohol

[chemical structure]

Mod033 (with PO or PS connecting to 5′-O— of oligonucleotide chain) and Stearyl alcohol

[chemical structure]

[1548] Applicant notes that presented above in the Table are example ways of presenting structures of provided oligonucleotides, for example, WV-3546 (Mod020L001fU*SfC*SfA*SfA*SfG*SfG*SmAfA*SmGmA*SfU*SmGmGfC*SfA*SfU*SfU*SfJU*SfC*SfU (SEQ ID NO: 1712)) can be presented as a lipid moiety (Mod020,

[chemical structure]

connected via —C(O)— (OOSSSSSSOSOSSOOSSSSSS) to the —NH— of —NH—(CH₂)₆—, wherein the —(CH₂)₆— is connected to the 5′-end of the oligonucleotide chain via a phosphodiester linkage (OOSSSSSSOSOSSOOSSSSSS). One having ordinary skill in the art understands that a provided oligonucleotide can be presented as combinations of lipid, linker and oligonucleotide chain units in many different ways, wherein in each way the combination of the units provides the same oligonucleotide. For example, WV-3546, can be considered to have a structure of A^{c}-[-L^{LD}-(R^{LD})ₐ]_{b}, wherein a is 1, b is 1, and have a lipid moiety R^{LD} of

[chemical structure]

connected to its oligonucleotide chain (A^{c}) portion through a linker L^{LD} of —C(O)—NH—(CH₂)₆—OP(═O)(OH)—O—, wherein —C(O)— is connected to R^{LD}, and —O— is connected to A^{c} (as 5′-O— of the oligonucleotide chain); one of the many alternative ways is that R^{LD} is

[chemical structure]

and L^{LD} is —NH—(CH₂)₆—OP(═O)(OH)—O—, wherein —NH— is connected to R^{LD}, and —O— is connected to A^{c} (as 5′-O— of the oligonucleotide chain).

[1549] Oligonucleotides were prepared and characterized using a variety of methods in accordance of the present disclosure. Example MS data are presented below:

| WAVE | | |
|---|---|---|
| ID | Calculated Mass | Found Mass |
| WV-2531 | 6767.90000 | 6766.3 |
| WV-3152 | 6743.77000 | 6742.8 |
| WV-3472 | 6720.78472 | 6720.8 |
| WV-3473 | 6732.82024 | 6735 |
| WV-3507 | 6716.75464 | 6717.3 |
| WV-3508 | 6704.71912 | 6706 |
| WV-3509 | 6716.75464 | 6718 |
| WV-3510 | 6716.75464 | 6717.6 |
| WV-3511 | 6728.79016 | 6731 |
| WV-3512 | 6700.68904 | 6702 |
| WV-3513 | 6712.72456 | 6713 |
| WV-3514 | 6688.65352 | 6688.9 |
| WV-3515 | 6700.68904 | 6701.2 |
| WV-3545 | 7178.43622 | 7178 |
| WV-3546 | 7294.59604 | 7295 |

*Calculated and found mass data of WV-2531 and WV-3152 are for sodium adducts.

[1550] In various embodiments, a composition comprises a lipid and a nucleic acid [as non-limiting examples: an oligonucleotide, an antisense oligonucleotide, an RNAi agent, a miRNA, immunomodulatory nucleic acid, an aptamer, a Piwi-interacting RNA (piRNA), a small nucleolar RNA (snoRNA), a ribozyme, a mRNA, a lncRNA, a ncRNA, an antigomir (e.g., an antagonist to a miRNA, lncRNA, ncRNA or other nucleic acid), a plasmid, or a vector, or a portion thereof] which targets any gene listed herein.

[1551] In some embodiments, a composition comprises a lipid and a nucleic acid which targets any of: AFF2, APOB, APOC3, AR, ATM, ATN1, ATXN1, ATXN10, ATXN2, ATXN3, ATXN7, ATXN80S, BACE1, BBS1, BCL2L1, BRCA1, BRCA2, C9orf72, CACNA1A, CD40, CD40, CDKN1A, CFTR, CLC1, CNBP, COL7A1, CYP11A, DMD, DMPK, DYSF, Dystrophin, ERBB2, F7, F9, FANCC, FGB, FGFR1, FKTN, FLT1, FMR1, FXN, GHR, GRP143, HBB, HNRNPH1, HTT (Huntingtin), IKBKAP, IL5RA, ISCU, JPH3, KDR, LMNA, MAPT, MCL1, MDM2, MLC1, MST1R, MSTN, MUT, MYC, NF1, NPC1, PCCA, PCCB, PHB, PKM, PMM2, PPP2R2B, PTCH1, PTS, PTS, RHO, RHO, RPGR, RPGR, SMN2, SRA1, STAT3, TBP, TERT, TMPRSS2, TNFRSF1B, USH1C, USP5, and WT1.

[1552] In some embodiments, the common base sequence is capable of hybridizing with a transcript in a cell. In some embodiments, a common base sequence hybridizes with a transcript of any gene described herein or known in the art.

[1553] In some embodiments, a composition comprises a lipid and a biologically active agent suitable for treatment of any of: Afibrinogenemia, Alzheimer's disease, Alzheimer's disease/FTDP-17 Taupathies, Ataxia telangiectasia, Bardet-Biedl syndrome, Beta-thalassemia, Cancer, CDG1A, Congenital adrenal insufficiency, Cystic fibrosis, Dentatorubral-pallidoluysian atrophy, Duchenne muscular dystrophy, Dystrophic epidermolysis bullosa, Factor VII deficiency, Familial dysautonomia, Fanconi anemia, FHBL/atherosclerosis, Fragile X mental retardation, Fragile X syndrome, Friedreich's ataxia, Frontotemporal dementia, Fukuyama congenital muscular dystrophy (FCMD), Growth hormone insensitivity, Hemophilia A, HPABH4A, Huntington's Disease, Huntington's Disease-like 2, Hutchinson-Gilford progeria (HGPS), Immune-response, Inflammatory disease, Influenza virus, Machado-Joseph disease, Mental retardation, Mental retardation, X-linked, associated with FRAXE, Methylmalonic aciduria, Miyoshi myopathy, MLC1, Muscle wasting diseases, Myopathy with lactic acidosis, Myotonic dystrophy, Neurofibromatosis, Niemann-Pick type C, Ocular albinism type 1, Oculpopharyngeal muscular dystrophy, Propionic acidemia, Retinitis pigmentosa, Spinal muscular atrophy, Spinocerebellar ataxia, Spinocerebellar ataxia type 1, Spinomuscular bulbar atrophy, or Usher syndrome.

[1554] In some embodiments, an antisense oligonucleotide is an oligonucleotide which participates in RNaseH-mediated cleavage; for example, an antisense oligonucleotide hybridizes in a sequence-specific manner to a portion of a target mRNA, thus targeting the mRNA for cleavage my RNaseH. In some embodiments, an antisense oligonucleotide is able to differentiate between a wild-type and a mutant allele of a target. In some embodiments, an antisense oligonucleotide significantly participates in RNaseH-mediated cleavage of a mutant allele but participates in RNaseH-mediated cleavage of a wild-type allele to a much less degree (e.g., does not significantly participate in RNaseH-mediated cleavage of the wild-type allele of the target).

[1555] In various embodiments, a composition comprises a lipid and a nucleic acid [as non-limiting examples: an oligonucleotide, an antisense oligonucleotide, an RNAi agent, a miRNA, immunomodulatory nucleic acid, an aptamer, a Piwi-interacting RNA (piRNA), a small nucleolar RNA (snoRNA), a ribozyme, a mRNA, a lncRNA, a ncRNA, an antigomir (e.g., an antagonist to a miRNA, lncRNA, ncRNA or other nucleic acid), a plasmid, or a vector, or a portion thereof] which targets Huntingtin gene.

[1556] In various embodiments, a composition comprises a lipid and a nucleic acid [as non-limiting examples: an oligonucleotide, an antisense oligonucleotide, an RNAi agent, a miRNA, immunomodulatory nucleic acid, an aptamer, a Piwi-interacting RNA (piRNA), a small nucleolar RNA (snoRNA), a ribozyme, a mRNA, a lncRNA, a ncRNA, an antigomir (e.g., an antagonist to a miRNA, lncRNA, ncRNA or other nucleic acid), a plasmid, or a vector, or a portion thereof] which targets a mutant allele of Huntingtin gene.

[1557] In various embodiments, a composition comprises a lipid and a nucleic acid [as non-limiting examples: an oligonucleotide, an antisense oligonucleotide, an RNAi agent, a miRNA, immunomodulatory nucleic acid, an aptamer, a Piwi-interacting RNA (piRNA), a small nucleolar RNA (snoRNA), a ribozyme, a mRNA, a lncRNA, a ncRNA, an antigomir (e.g., an antagonist to a miRNA, lncRNA, ncRNA or other nucleic acid), a plasmid, or a vector, or a portion thereof] which is capable of differentiating between a wild-type and a mutant allele of Huntingtin gene.

[1558] Various oligonucleotides to HTT (Huntingtin gene) are listed below, in Table 8.

TABLE 8
Example HTT Oligonucleotides.

| | | SEQ | | SEQ | | | |
|---|---|---|---|---|---|---|---|
| | | ID | | ID | | | |
| WAVE ID | Base Sequence | NO: | Description | NO: | Stereochemistry | Notes 1 | Notes 2 |
| ONT-450 | ATTAATAAATT | 1713 | A*T*T*A*A*T*A*A*A*T* | 2065 | XXXXXXXXX | Stereorandom | Htt SNP |
| | GTCATCACC | | T*G*T*C*A*T*C*A*C*C | | XXXXXXXXXX | Htt sequence | rs7685686 |
| ONT-451 | ATTAATAAATT | 1714 | A*ST*ST*SA*SA*ST*SA*S | 2066 | SSSSSSSSSSSS | Stereopure Htt | Htt SNP |
| (WV-451) | GTCATCACC | | A*SA*ST*ST*SG*ST*SC*R | | SRSSSSS | sequence I | rs7685686 |
| | | | A*ST*SC*SA*SC*SC | | | | |
| ONT-452 | ATTAATAAATT | 1715 | A*ST*ST*SA*SA*ST*SA*S | 2067 | SSSSSSSSSSSS | Stereopure Htt | Htt SNP |
| | GTCATCACC | | A*SA*ST*ST*SG*ST*SC*S | | SSRSSSS | sequence II | rs7685686 |
| | | | A*RT*SC*SA*SC*SC | | | | |
| ONT-453 | GGUGAUGACA | 1716 | rGrGrUrGrArUrGrArCrArAr | 2068 | OOOOOOOOO | RNA against Htt | Htt SNP |
| | AUUUAUUAAU | | UrUrUrArUrUrArArU | | OOOOOOOOOO | sequence Mutant | rs7685686 |
| ONT-454 | GGUGAUGGCA | 1717 | rGrGrUrGrArUrGrGrCrArAr | 2069 | OOOOOOOOO | RNA against Htt | Htt SNP |
| | AUUUAUUAAU | | UrUrUrArUrUrArArU | | OOOOOOOOOO | sequence Wild | rs7685686 |
| | | | | | | Type | |
| WV-902 | UUUGGAAGUC | 1718 | rUrUrUrGrGrArArGrUrCrUr | 2070 | OOOOOOOOO | wtRNA | muHTT SNP |
| | UGCGCCCUUGU | | GrCrGrCrCrCrUrUrGrUrGrC | | OOOOOOOOO | | 362307 |
| | GCCC | | rCrC | | OOOOOO | | |
| WV-903 | UUUGGAAGUC | 1719 | rUrUrUrGrGrArArGrUrCrUr | 2071 | OOOOOOOOO | mRNA | muHTT SNP |
| | UGUGCCCUUGU | | GrUrGrCrCrCrUrUrGrUrGrC | | OOOOOOOOO | | 362307 |
| | GCCC | | rCrC | | OOOOOO | | |
| WV-904 | GGGCACAAGG | 1720 | G*G*G*C*A*C*A*A*G*G* | 2072 | XXXXXXXXX | ASO1 All DNA; | muHTT SNP |
| | GCACAGACTT | | G*C*A*C*A*G*A*C*T*T | | XXXXXXXXXX | stereorandom PS | 362307 |
| WV-905 | GGCACAAGGGC | 1721 | G*G*C*A*C*A*A*G*G*G* | 2073 | XXXXXXXXX | ASO2 All DNA; | muHTT SNP |
| | ACAGACTTC | | C*A*C*A*G*A*C*T*T*C | | XXXXXXXXXX | stereorandom PS | 362307 |
| WV-906 | GCACAAGGGCA | 1722 | G*C*A*C*A*A*G*G*G*C* | 2074 | XXXXXXXXX | ASO3 All DNA; | muHTT SNP |
| | CAGACTTCC | | A*C*A*G*A*C*T*T*C*C | | XXXXXXXXXX | stereorandom PS | 362307 |
| WV-907 | CACAAGGGCAC | 1723 | C*A*C*A*A*G*G*G*C*A* | 2075 | XXXXXXXXX | ASO4 All DNA; | muHTT SNP |
| | AGACTTCCA | | C*A*G*A*C*T*T*C*C*A | | XXXXXXXXXX | stereorandom PS | 362307 |
| WV-908 | ACAAGGGCACA | 1724 | A*C*A*A*G*G*G*C*A*C* | 2076 | XXXXXXXXX | ASO5 All DNA; | muHTT SNP |
| | GACTTCCAA | | A*G*A*C*T*T*C*C*A*A | | XXXXXXXXXX | stereorandom PS | 362307 |
| WV-909 | CAAGGGCACAG | 1725 | C*A*A*G*G*G*C*A*C*A* | 2077 | XXXXXXXXX | ASO6 All DNA; | muHTT SNP |
| | ACTTCCAAA | | G*A*C*T*T*C*C*A*A*A | | XXXXXXXXXX | stereorandom PS | 362307 |
| WV-910 | GGGCACAAGG | 1726 | mG*mG*mG*mC*mA*C*A | 2078 | XXXXXXXXX | ASO7 5-15 (2′- | muHTT SNP |
| | GCACAGACTT | | *A*G*G*G*C*A*C*A*G*A | | XXXXXXXXXX | OMe-DNA); | 362307 |
| | | | *C*T*T | | | stereorandom PS | |
| WV-911 | GGCACAAGGGC | 1727 | mG*mG*mC*mA*mC*A*A | 2079 | XXXXXXXXX | ASO8 5-15 (2′- | muHTT SNP |
| | ACAGACTTC | | *G*G*G*C*A*C*A*G*A*C | | XXXXXXXXXX | OMe-DNA); | 362307 |
| | | | *T*T*C | | | stereorandom PS | |
| WV-912 | GCACAAGGGCA | 1728 | mG*mC*mA*mC*mA*A*G | 2080 | XXXXXXXXX | ASO9 5-15 (2′- | muHTT SNP |
| | CAGACTTCC | | *G*G*C*A*C*A*G*A*C*T | | XXXXXXXXXX | OMe-DNA); | 362307 |
| | | | *T*C*C | | | stereorandom PS | |
| WV-913 | CACAAGGGCAC | 1729 | mC*mA*mC*mA*mA*G*G | 2081 | XXXXXXXXX | ASO10 5-15 (2′- | muHTT SNP |
| | AGACTTCCA | | *G*C*A*C*A*G*A*C*T*T | | XXXXXXXXXX | OMe-DNA); | 362307 |
| | | | *C*C*A | | | stereorandom PS | |
| WV-914 | ACAAGGGCACA | 1730 | mA*mC*mA*mA*mG*G*G | 2082 | XXXXXXXXX | ASO11 5-15 (2′- | muHTT SNP |
| | GACTTCCAA | | *C*A*C*A*G*A*C*T*T*C* | | XXXXXXXXXX | OMe-DNA); | 362307 |
| | | | C*A*A | | | stereorandom PS | |
| WV-915 | CAAGGGCACAG | 1731 | mC*mA*mA*mG*mG*G*C | 2083 | XXXXXXXXX | ASO12 5-15 (2′- | muHTT SNP |
| | ACTTCCAAA | | *A*C*A*G*A*C*T*T*C*C* | | XXXXXXXXXX | OMe-DNA); | 362307 |
| | | | A*A*A | | | stereorandom PS | |
| WV-916 | GGGCACAAGG | 1732 | mG*mG*mG*mC*mA*C*A | 2084 | XXXXXXXXX | ASO13 5-10-5 | muHTT SNP |
| | GCACAGACUU | | *A*G*G*G*C*A*C*A*mG* | | XXXXXXXXXX | (2′-OMe-DNA- | 362307 |
| | | | mA*mC*mU*mU | | | 2′-OMe); | |
| | | | | | | stereorandom PS | |
| WV-917 | GGCACAAGGGC | 1733 | mG*mG*mC*mA*mC*A*A | 2085 | XXXXXXXXX | ASO14 5-10-5 | muHTT SNP |
| | ACAGACUUC | | *G*G*G*C*A*C*A*G*mA* | | XXXXXXXXXX | (2′-OMe-DNA- | 362307 |
| | | | mC*mU*mU*mC | | | 2′-OMe); | |
| | | | | | | stereorandom PS | |
| WV-918 | GCACAAGGGCA | 1734 | mG*mC*mA*mC*mA*A*G | 2086 | XXXXXXXXX | ASO15 5-10-5 | muHTT SNP |
| | CAGACUUCC | | *G*G*C*A*C*A*G*A*mC* | | XXXXXXXXXX | (2′-OMe-DNA- | 362307 |
| | | | mU*mU*mC*mC | | | 2′-OMe); | |
| | | | | | | stereorandom PS | |
| WV-919 | CACAAGGGCAC | 1735 | mC*mA*mC*mA*mA*G*G | 2087 | XXXXXXXXX | ASO16 5-10-5 | muHTT SNP |
| | AGACUUCCA | | *G*C*A*C*A*G*A*C*mU* | | XXXXXXXXXX | (2′-OMe-DNA- | 362307 |
| | | | mU*mC*mC*mA | | | 2′-OMe); | |
| | | | | | | stereorandom PS | |
| WV-920 | ACAAGGGCACA | 1736 | mA*mC*mA*mA*mG*G*G | 2088 | XXXXXXXXX | ASO17 5-10-5 | muHTT SNP |
| | GACTUCCAA | | *C*A*C*A*G*A*C*T*mU* | | XXXXXXXXXX | (2′-OMe-DNA- | 362307 |
| | | | mC*mC*mA*mA | | | 2′-OMe); | |
| | | | | | | stereorandom PS | |
| WV-921 | CAAGGGCACAG | 1737 | mC*mA*mA*mG*mG*G*C | 2089 | XXXXXXXXX | ASO18 5-10-5 | muHTT SNP |
| | ACTTCCAAA | | *A*C*A*G*A*C*T*T*mC* | | XXXXXXXXXX | (2′-OMe-DNA- | 362307 |
| | | | mC*mA*mA*mA | | | 2′-OMe); | |
| | | | | | | stereorandom PS | |
| WV-922 | GCACAAGGGCA | 1738 | mG*mC*mA*mC*mA*mA* | 2090 | XXXXXXXXX | ASO19 8-7-5 (2′- | muHTT SNP |
| | CAGACUUCC | | mG*mG*G*C*A*C*A*G*A | | XXXXXXXXXX | OMe-DNA-2′- | 362307 |
| | | | *mC*mU*mU*mC*mC | | | OMe); | |
| | | | | | | stereorandom PS | |
| WV-923 | CACAAGGGCAC | 1739 | mC*mA*mC*mA*mA*mG* | 2091 | XXXXXXXXX | ASO20 7-7-6 (2′- | muHTT SNP |
| | AGACUUCCA | | mG*G*C*A*C*A*G*A*mC | | XXXXXXXXXX | OMe-DNA-2′- | 362307 |
| | | | *mU*mU*mC*mC*mA | | | OMe); | |
| | | | | | | stereorandom PS | |
| WV-924 | ACAAGGGCACA | 1740 | mA*mC*mA*mA*mG*mG* | 2092 | XXXXXXXXX | ASO21 6-7-5 (2′- | muHTT SNP |
| | GACUUCCAA | | G*C*A*C*A*G*A*mC*mU | | XXXXXXXXXX | OMe-DNA-2′- | 362307 |
| | | | *mU*mC*mC*mA*mA | | | OMe); | |
| | | | | | | stereorandom PS; | |
| | | | | | | PO in the wings | |
| WV-925 | CAAGGGCACAG | 1741 | mC*mA*mA*mG*mG*G*C | 2093 | XXXXXXXXX | ASO22 5-7-8 (2′- | muHTT SNP |
| | ACUUCCAAA | | *A*C*A*G*A*mC*mU*mU | | XXXXXXXXXX | OMe-DNA-2′- | 362307 |
| | | | *mC*mC*mA*mA*mA | | | OMe); | |
| | | | | | | stereorandom PS; | |
| | | | | | | PO in the wings | |
| WV-926 | GCACAAGGGCA | 1742 | mGmCmAmCmAmAmGmG | 2094 | OOOOOOOXX | ASO23 8-7-5 (2′- | muHTT SNP |
| | CAGACUUCC | | *G*C*A*C*A*G*A*mCmU | | XXXXXXOOOO | OMe-DNA-2′- | 362307 |
| | | | mUmCmC | | | OMe); | |
| | | | | | | stereorandom PS; | |
| | | | | | | PO in the wings | |
| WV-927 | CACAAGGGCAC | 1743 | mCmAmCmAmAmGmG*G* | 2095 | OOOOOOXXX | ASO24 7-7-6 (2′- | muHTT SNP |
| | AGACUUCCA | | C*A*C*A*G*A*mCmUmU | | XXXXXOOOOO | OMe-DNA-2′- | 362307 |
| | | | mCmCmA | | | OMe); | |
| | | | | | | stereorandom PS; | |
| | | | | | | PO in the wings | |
| WV-928 | ACAAGGGCACA | 1744 | mAmCmAmAmGmG*G*C* | 2096 | OOOOOXXXX | ASO25 6-7-5 (2′- | muHTT SNP |
| | GACUUCCAA | | A*C*A*G*A*mCmUmUmC | | XXXXOOOOOO | OMe-DNA-2′- | 362307 |
| | | | mCmAmA | | | OMe); | |
| | | | | | | stereorandom PS; | |
| | | | | | | PO in the wings | |
| WV-929 | CAAGGGCACAG | 1745 | mCmAmAmGmG*G*C*A*C | 2097 | OOOOXXXXX | ASO26 5-7-8 (2′- | muHTT SNP |
| | ACUUCCAAA | | *A*G*A*mCmUmUmCmCm | | XXXOOOOOOO | OMe-DNA-2′- | 362307 |
| | | | AmAmA | | | OMe); | |
| | | | | | | stereorandom PS; | |
| | | | | | | PO in the wings | |
| WV-930 | GGGCACAAGG | 1746 | mGmGmGmCmA*C*A*A*G | 2098 | OOOOXXXXX | ASO27 5-10-5 | muHTT SNP |
| | GCACAGACUU | | *G*G*C*A*C*A*mGmAmC | | XXXXXXOOOO | (2′-OMe-DNA- | 362307 |
| | | | mUmU | | | 2′-OMe); | |
| | | | | | | stereorandom PS; | |
| | | | | | | PO in the wings | |
| WV-931 | GGCACAAGGGC | 1747 | mGmGmCmAmC*A*A*G*G | 2099 | OOOOXXXXX | ASO28 5-10-5 | muHTT SNP |
| | ACAGACUUC | | *G*C*A*C*A*G*mAmCmU | | XXXXXXOOOO | (2′-OMe-DNA- | 362307 |
| | | | mUmC | | | 2′-OMe); | |
| | | | | | | stereorandom PS; | |
| | | | | | | PO in the wings | |
| WV-932 | GCACAAGGGCA | 1748 | mGmCmAmCmA*A*G*G*G | 2100 | OOOOXXXXX | ASO29 5-10-5 | muHTT SNP |
| | CAGACUUCC | | *C*A*C*A*G*A*mCmUmU | | XXXXXXOOOO | (2′-OMe-DNA- | 362307 |
| | | | mCmC | | | 2′-OMe); | |
| | | | | | | stereorandom PS; | |
| | | | | | | PO in the wings | |
| WV-933 | CACAAGGGCAC | 1749 | mCmAmCmAmA*G*G*G*C | 2101 | OOOOXXXXX | ASO30 5-10-5 | muHTT SNP |
| | AGACUUCCA | | *A*C*A*G*A*C*mUmUmC | | XXXXXXOOOO | (2′-OMe-DNA- | 362307 |
| | | | mCmA | | | 2′-OMe); | |
| | | | | | | stereorandom PS; | |
| | | | | | | PO in the wings | |
| WV-934 | ACAAGGGCACA | 1750 | mAmCmAmAmG*G*G*C*A | 2102 | OOOOXXXXX | ASO31 5-10-5 | muHTT SNP |
| | GACTUCCAA | | *C*A*G*A*C*T*mUmCmC | | XXXXXXOOOO | (2′-OMe-DNA- | 362307 |
| | | | mAmA | | | 2′-OMe); | |
| | | | | | | stereorandom PS; | |
| | | | | | | PO in the wings | |
| WV-935 | CAAGGGCACAG | 1751 | mCmAmAmGmG*G*C*A*C | 2103 | OOOOXXXXX | ASO32 5-10-5 | muHTT SNP |
| | ACTTCCAAA | | *A*G*A*C*T*T*mCmCmA | | XXXXXXOOOO | (2′-OMe-DNA- | 362307 |
| | | | mAmA | | | 2′-OMe); | |
| | | | | | | stereorandom PS; | |
| | | | | | | PO in the wings | |
| WV-936 | GGGCACAAGG | 1752 | G*SG*SG*SC*SA*SC*SA* | 2104 | SSSSSSSSSSSS | ASO33 | muHTT SNP |
| | GCACAGACTT | | SA*SG*SG*SG*SC*SA*SC | | SRSSSSS | Stereopure DNA; | 362307 |
| | | | *RA*SG*SA*SC*ST*ST | | | One Rp; position | |
| | | | | | | 14 | |
| WV-937 | GGCACAAGGGC | 1753 | G*SG*SC*SA*SC*SA*SA* | 2105 | SSSSSSSSSSSS | ASO34 | muHTT SNP |
| | ACAGACTTC | | SG*SG*SG*SC*SA*SC*RA | | RSSSSSS | Stereopure DNA; | 362307 |
| | | | *SG*SA*SC*ST*ST*SC | | | One Rp; position | |
| | | | | | | 13 | |
| WV-938 | GCACAAGGGCA | 1754 | G*SC*SA*SC*SA*SA*SG* | 2106 | SSSSSSSSSSSR | ASO35 | muHTT SNP |
| | CAGACTTCC | | SG*SG*SC*SA*SC*RA*SG | | SSSSSSS | Stereopure DNA; | 362307 |
| | | | *SA*SC*ST*ST*SC*SC | | | One Rp; position | |
| | | | | | | 12 | |
| WV-939 | CACAAGGGCAC | 1755 | C*SA*SC*SA*SA*SG*SG* | 2107 | SSSSSSSSSSRS | ASO36 | muHTT SNP |
| | AGACTTCCA | | SG*SC*SA*SC*RA*SG*SA | | SSSSSSS | Stereopure DNA; | 362307 |
| | | | *SC*ST*ST*SC*SC*SA | | | One Rp; position | |
| | | | | | | 11 | |
| WV-940 | ACAAGGGCACA | 1756 | A*SC*SA*SA*SG*SG*SG* | 2108 | SSSSSSSSSRSS | ASO37 | muHTT SNP |
| | GACTTCCAA | | SC*SA*SC*RA*SG*SA*SC | | SSSSSSS | Stereopure DNA; | 362307 |
| | | | *ST*ST*SC*SC*SA*SA | | | One Rp; position | |
| | | | | | | 10 | |
| WV-941 | CAAGGGCACAG | 1757 | C*SA*SA*SG*SG*SG*SC* | 2109 | SSSSSSSSRSSS | ASO38 | muHTT SNP |
| | ACTTCCAAA | | SA*SC*RA*SG*SA*SC*ST | | SSSSSSS | Stereopure DNA; | 362307 |
| | | | *ST*SC*SC*SA*SA*SA | | | One Rp; position 9 | |
| WV-944 | UUUGGAAGUC | 1758 | rUrUrUrGrGrArArGrUrCrUr | 2110 | OOOOOOOOO | HTT-rs362307 | Huntington |
| | UGCGCCCUUGU | | GrCrGrCrCrCrUrUrGrUrGrC | | OOOOOOOOO | human | |
| | GCCC | | rCrC | | OOOOOO | | |
| WV-945 | UUUGGAAGUC | 1759 | rUrUrUrGrGrArArGrUrCrUr | 2111 | OOOOOOOOO | HTT-rs362307 | Huntington |
| | UGUGCCCUUGU | | GrUrGrCrCrCrUrUrGrUrGrC | | OOOOOOOOO | human | |
| | GCCC | | rCrC | | OOOOOO | | |
| WV-948 | GAGCAGCTGCA | 1760 | G*A*G*C*A*G*C*T*G*C* | 2112 | XXXXXXXXX | HTT-rs362306 | HTT-rs362306 |
| | ACCTGGCAA | | A*A*C*C*T*G*G*C*A*A | | XXXXXXXXXX | | |
| WV-949 | GGGCCAACAGC | 1761 | G*G*G*C*C*A*A*C*A*G* | 2113 | XXXXXXXXX | HTT-rs362268 | HTT-rs362268 |
| | CAGCCTGCA | | C*C*A*G*C*C*T*G*C*A | | XXXXXXXXXX | | |
| WV-950 | GGUUGUUGCC | 1762 | rGrGrUrUrGrUrUrGrCrCrAr | 2114 | OOOOOOOOO | | HTT-rs362306 |
| | AGGUUACAGC | | GrGrUrUrArCrArGrCrUrGrC | | OOOOOOOOO | | |
| | UGCUC | | rUrC | | OOOOOO | | |
| WV-951 | GGUUGUUGCC | 1763 | rGrGrUrUrGrUrUrGrCrCrAr | 2115 | OOOOOOOOO | | HTT-rs362306 |
| | AGGUUGCAGC | | GrGrUrUrGrCrArGrCrUrGrC | | OOOOOOOOO | | |
| | UGCUC | | rUrC | | OOOOOO | | |
| WV-952 | GAGCAGCTGCA | 1764 | G*SA*SG*SC*SA*SG*SC* | 2116 | SSSSSSSSSSRS | Stereopure PS | HTT-rs362306 |
| | ACCTGGCAA | | ST*SG*SC*SA*RA*SC*SC* | | SSSSSSS | DNA; One Rp at | |
| | | | ST*SG*SG*SC*SA*SA | | | position 11 | |
| WV-953 | AGCAGCTGCAA | 1765 | A*SG*SC*SA*SG*SC*ST*S | 2117 | SSSSSSSSSRSS | Stereopure PS | HTT-rs362306 |
| | CCTGGCAAC | | G*SC*SA*RA*SC*SC*ST*S | | SSSSSSS | DNA; One Rp at | |
| | | | G*SG*SC*SA*SA*SC | | | position 10 | |
| WV-954 | GCAGCTGCAAC | 1766 | G*SC*SA*SG*SC*ST*SG*S | 2118 | SSSSSSSSRSSS | Stereopure PS | HTT-rs362306 |
| | CTGGCAACA | | C*SA*RA*SC*SC*ST*SG*S | | SSSSSSS | DNA; One Rp at | |
| | | | G*SC*SA*SA*SC*SA | | | position 9 | |
| WV-955 | CAGCTGCAACC | 1767 | C*SA*SG*SC*ST*SG*SC*S | 2119 | SSSSSSSRSSSS | Stereopure PS | HTT-rs362306 |
| | TGGCAACAA | | A*RA*SC*SC*ST*SG*SG* | | SSSSSSS | DNA; One Rp at | |
| | | | SC*SA*SA*SC*SA*SA | | | position 8 | |
| WV-956 | AGCTGCAACCT | 1768 | A*SG*SC*ST*SG*SC*SA* | 2120 | SSSSSSRSSSSS | Stereopure PS | HTT-rs362306 |
| | GGCAACAAC | | RA*SC*SC*ST*SG*SG*SC* | | SSSSSSS | DNA; One Rp at | |
| | | | SA*SA*SC*SA*SA*SC | | | position 7 | |
| WV-957 | GCTGCAACCTG | 1769 | G*SC*ST*SG*SC*SA*RA* | 2121 | SSSSSRSSSSSS | Stereopure PS | HTT-rs362306 |
| | GCAACAACC | | SC*SC*ST*SG*SG*SC*SA* | | SSSSSSS | DNA; One Rp at | |
| | | | SA*SC*SA*SA*SC*SC | | | position 6 | |
| WV-958 | CCUCCUGCAGG | 1770 | rCrCrUrCrCrUrGrCrArGrGrC | 2122 | OOOOOOOOO | | HTT-rs362268 |
| | CUGGGUGUUG | | rUrGrGrGrUrGrUrUrGrGrCr | | OOOOOOOOO | | |
| | GCCC | | CrC | | OOOOOO | | |
| WV-959 | CCUCCUGCAGG | 1771 | rCrCrUrCrCrUrGrCrArGrGrC | 2123 | OOOOOOOOO | | HTT-rs362268 |
| | CUGGCUGUUG | | rUrGrGrCrUrGrUrUrGrGrCr | | OOOOOOOOO | | |
| | GCCC | | CrC | | OOOOOO | | |
| WV-960 | GGGCCAACAGC | 1772 | G*SG*SG*SC*SC*SA*SA* | 2124 | SSSSSSSSSSRS | Stereopure PS | HTT-rs362268 |
| | CAGCCTGCA | | SC*SA*SG*SC*RC*SA*SG | | SSSSSSS | DNA; One Rp at | |
| | | | *SC*SC*ST*SG*SC*SA | | | position 11 | |
| WV-961 | GGCCAACAGCC | 1773 | G*SG*SC*SC*SA*SA*SC*S | 2125 | SSSSSSSSSRSS | Stereopure PS | HTT-rs362268 |
| | AGCCTGCAG | | A*SG*SC*RC*SA*SG*SC* | | SSSSSSS | DNA; One Rp at | |
| | | | SC*ST*SG*SC*SA*SG | | | position 10 | |
| WV-962 | GCCAACAGCCA | 1774 | G*SC*SC*SA*SA*SC*SA*S | 2126 | SSSSSSSSRSSS | Stereopure PS | HTT-rs362268 |
| | GCCTGCAGG | | G*SC*RC*SA*SG*SC*SC* | | SSSSSSS | DNA; One Rp at | |
| | | | ST*SG*SC*SA*SG*SG | | | position 9 | |
| WV-963 | CCAACAGCCAG | 1775 | C*SC*SA*SA*SC*SA*SG*S | 2127 | SSSSSSSRSSSS | Stereopure PS | HTT-rs362268 |
| | CCTGCAGGA | | C*RC*SA*SG*SC*SC*ST*S | | SSSSSSS | DNA; One Rp at | |
| | | | G*SC*SA*SG*SG*SA | | | position 8 | |
| WV-964 | CAACAGCCAGC | 1776 | C*SA*SA*SC*SA*SG*SC* | 2128 | SSSSSSRSSSSS | Stereopure PS | HTT-rs362268 |
| | CTGCAGGAG | | RC*SA*SG*SC*SC*ST*SG* | | SSSSSSS | DNA; One Rp at | |
| | | | SC*SA*SG*SG*SA*SG | | | position 7 | |
| WV-965 | AACAGCCAGCC | 1777 | A*SA*SC*SA*SG*SC*RC* | 2129 | SSSSSRSSSSSS | Stereopure PS | HTT-rs362268 |
| | TGCAGGAGG | | SA*SG*SC*SC*ST*SG*SC* | | SSSSSSS | DNA; One Rp at | |
| | | | SA*SG*SG*SA*SG*SG | | | position 6 | |
| WV-973 | GGCCUUUCACU | 1778 | rGrGrCrCrUrUrUrCrArCrUr | 2130 | OOOOOOOOO | siRNA (+control | Htt |
| | ACUCCUACTT | | ArCrUrCrCrUrArCTT | | OOOOOOOOO | for Renilla | |
| | | | | | OO | luciferase in | |
| | | | | | | psiCHECK2 | |
| | | | | | | plasmid) | |
| | | | | | | antisense strand | |
| WV-974 | GUAGGAGUAG | 1779 | rGrUrArGrGrArGrUrArGrUr | 2131 | OOOOOOOOO | siRNA (+control | Htt SNP |
| | UGAAAGGCCTT | | GrArArArGrGrCrCTT | | OOOOOOOOO | for Renilla | rs362268 |
| | | | | | OO | luciferase in | |
| | | | | | | psiCHECK2 | |
| | | | | | | plasmid) sense | |
| | | | | | | strand | |
| WV-975 | GTAGGAGTAGT | 1780 | G*T*A*G*G*A*G*T*A*G* | 2132 | XXXXXXXXX | ASO (+control | Htt SNP |
| | GAAAGGCCA | | T*G*A*A*A*G*G*C*C*A | | XXXXXXXXXX | for Renilla | rs362268 |
| | | | | | | luciferase in | |
| | | | | | | psiCHECK2 | |
| | | | | | | plasmid) | |
| WV-982 | GCAGGGCACAA | 1781 | G*SC*SA*SG*SG*SG*SC* | 2133 | SSSSSSSSSSSS | Htt seq 307 | Htt rs362307 |
| | GGGCACAGA | | SA*SC*SA*SA*SG*SG*SG | | SSSSRSS | expanding 3 nt | |
| | | | *SC*SA*SC*RA*SG*SA | | | towards 3′ | |
| | | | | | | example 3 | |
| WV-983 | CAGGGCACAAG | 1782 | C*SA*SG*SG*SG*SC*SA* | 2134 | SSSSSSSSSSSS | Htt seq 307 | Htt rs362307 |
| | GGCACAGAC | | SC*SA*SA*SG*SG*SG*SC | | SSSRSSS | expanding 3 nt | |
| | | | *SA*SC*RA*SG*SA*SC | | | towards 3′ | |
| | | | | | | example 2 | |
| WV-984 | AGGGCACAAG | 1783 | A*SG*SG*SG*SC*SA*SC* | 2135 | SSSSSSSSSSSS | Htt seq 307 | Htt rs362307 |
| | GGCACAGACT | | SA*SA*SG*SG*SG*SC*SA | | SSRSSSS | expanding 3 nt | |
| | | | *SC*RA*SG*SA*SC*ST | | | towards 3′ | |
| | | | | | | example 1 | |
| WV-985 | AAGGGCACAG | 1784 | A*SA*SG*SG*SG*SC*SA* | 2136 | SSSSSSSRSSSS | Htt seq 307 | Htt rs362307 |
| | ACTTCCAAAG | | SC*RA*SG*SA*SC*ST*ST* | | SSSSSSS | expanding 3 nt | |
| | | | SC*SC*SA*SA*SA*SG | | | towards 5′ | |
| | | | | | | example 1 | |
| WV-986 | AGGGCACAGAC | 1785 | A*SG*SG*SG*SC*SA*SC* | 2137 | SSSSSSRSSSSS | Htt seq 307 | Htt rs362307 |
| | TTCCAAAGG | | RA*SG*SA*SC*ST*ST*SC* | | SSSSSSS | expanding 3 nt | |
| | | | SC*SA*SA*SA*SG*SG | | | towards 5′ | |
| | | | | | | example 2 | |
| WV-987 | GGGCACAGACT | 1786 | G*SG*SG*SC*SA*SC*RA* | 2138 | SSSSSRSSSSSS | Htt seq 307 | Htt rs362307 |
| | TCCAAAGGC | | SG*SA*SC*ST*ST*SC*SC* | | SSSSSSS | expanding 3 nt | |
| | | | SA*SA*SA*SG*SG*SC | | | towards 5′ | |
| | | | | | | example 3 | |
| WV-1001 | GAGCAGCTGCA | 1787 | G*A*G*C*A*G*C*T*G*C* | 2139 | XXXXXXXXX | All DNA; | HTT-rs362306 |
| | ACCTGGCAA | | A*A*C*C*T*G*G*C*A*A | | XXXXXXXXXX | stereorandom PS | |
| WV-1002 | AGCAGCTGCAA | 1788 | A*G*C*A*G*C*T*G*C*A* | 2140 | XXXXXXXXX | All DNA; | HTT-rs362306 |
| | CCTGGCAAC | | A*C*C*T*G*G*C*A*A*C | | XXXXXXXXXX | stereorandom PS | |
| WV-1003 | GCAGCTGCAAC | 1789 | G*C*A*G*C*T*G*C*A*A* | 2141 | XXXXXXXXX | All DNA; | HTT-rs362306 |
| | CTGGCAACA | | C*C*T*G*G*C*A*A*C*A | | XXXXXXXXXX | stereorandom PS | |
| WV-1004 | CAGCTGCAACC | 1790 | C*A*G*C*T*G*C*A*A*C* | 2142 | XXXXXXXXX | All DNA; | HTT-rs362306 |
| | TGGCAACAA | | C*T*G*G*C*A*A*C*A*A | | XXXXXXXXXX | stereorandom PS | |
| WV-1005 | AGCTGCAACCT | 1791 | A*G*C*T*G*C*A*A*C*C* | 2143 | XXXXXXXXX | All DNA; | HTT-rs362306 |
| | GGCAACAAC | | T*G*G*C*A*A*C*A*A*C | | XXXXXXXXXX | stereorandom PS | |
| WV-1006 | GCTGCAACCTG | 1792 | G*C*T*G*C*A*A*C*C*T* | 2144 | XXXXXXXXX | All DNA; | HTT-rs362306 |
| | GCAACAACC | | G*G*C*A*A*C*A*A*C*C | | XXXXXXXXXX | stereorandom PS | |
| WV-1007 | GAGCAGCTGCA | 1793 | mG*mA*mG*mC*mA*G*C | 2145 | XXXXXXXXX | 5-15 (2′-OMe- | HTT-rs362306 |
| | ACCTGGCAA | | *T*G*C*A*A*C*C*T*G*G | | XXXXXXXXXX | DNA); | |
| | | | *C*A*A | | | stereorandom PS | |
| WV-1008 | AGCAGCTGCAA | 1794 | mA*mG*mC*mA*mG*C*T* | 2146 | XXXXXXXXX | 5-15 (2′-OMe- | HTT-rs362306 |
| | CCTGGCAAC | | G*C*A*A*C*C*T*G*G*C* | | XXXXXXXXXX | DNA); | |
| | | | A*A*C | | | stereorandom PS | |
| WV-1009 | GCAGCTGCAAC | 1795 | mG*mC*mA*mG*mC*T*G* | 2147 | XXXXXXXXX | 5-15 (2′-OMe- | HTT-rs362306 |
| | CTGGCAACA | | C*A*A*C*C*T*G*G*C*A* | | XXXXXXXXXX | DNA); | |
| | | | A*C*A | | | stereorandom PS | |
| WV-1010 | CAGCUGCAACC | 1796 | mC*mA*mG*mC*mU*G*C* | 2148 | XXXXXXXXX | 5-15 (2′-OMe- | HTT-rs362306 |
| | TGGCAACAA | | A*A*C*C*T*G*G*C*A*A* | | XXXXXXXXXX | DNA); | |
| | | | C*A*A | | | stereorandom PS | |
| WV-1011 | AGCUGCAACCT | 1797 | mA*mG*mC*mU*mG*C*A | 2149 | XXXXXXXXX | 5-15 (2′-OMe- | HTT-rs362306 |
| | GGCAACAAC | | *A*C*C*T*G*G*C*A*A*C | | XXXXXXXXXX | DNA); | |
| | | | *A*A*C | | | stereorandom PS | |
| WV-1012 | GCUGCAACCTG | 1798 | mG*mC*mU*mG*mC*A*A | 2150 | XXXXXXXXX | 5-15 (2′-OMe- | HTT-rs362306 |
| | GCAACAACC | | *C*C*T*G*G*C*A*A*C*A | | XXXXXXXXXX | DNA); | |
| | | | *A*C*C | | | stereorandom PS | |
| WV-1013 | GAGCAGCTGCA | 1799 | mG*mA*mG*mC*mA*G*C | 2151 | XXXXXXXXX | 5-10-5 (2′-OMe- | HTT-rs362306 |
| | ACCTGGCAA | | *T*G*C*A*A*C*C*T*mG* | | XXXXXXXXXX | DNA-2′-OMe); | |
| | | | mG*mC*mA*mA | | | stereorandom PS | |
| WV-1014 | AGCAGCTGCAA | 1800 | mA*mG*mC*mA*mG*C*T* | 2152 | XXXXXXXXX | 5-10-5 (2′-OMe- | HTT-rs362306 |
| | CCTGGCAAC | | G*C*A*A*C*C*T*G*mG*m | | XXXXXXXXXX | DNA-2′-OMe); | |
| | | | C*mA*mA*mC | | | stereorandom PS | |
| WV-1015 | GCAGCTGCAAC | 1801 | mG*mC*mA*mG*mC*T*G* | 2153 | XXXXXXXXX | 5-10-5 (2′-OMe- | HTT-rs362306 |
| | CTGGCAACA | | C*A*A*C*C*T*G*G*mC*m | | XXXXXXXXXX | DNA-2′-OMe); | |
| | | | A*mA*mC*mA | | | stereorandom PS | |
| WV-1016 | CAGCUGCAACC | 1802 | mC*mA*mG*mC*mU*G*C* | 2154 | XXXXXXXXX | 5-10-5 (2′-OMe- | HTT-rs362306 |
| | TGGCAACAA | | A*A*C*C*T*G*G*C*mA*m | | XXXXXXXXXX | DNA-2′-OMe); | |
| | | | A*mC*mA*mA | | | stereorandom PS | |
| WV-1017 | AGCUGCAACCT | 1803 | mA*mG*mC*mU*mG*C*A | 2155 | XXXXXXXXX | 5-10-5 (2′-OMe- | HTT-rs362306 |
| | GGCAACAAC | | *A*C*C*T*G*G*C*A*mA* | | XXXXXXXXXX | DNA-2′-OMe); | |
| | | | mC*mA*mA*mC | | | stereorandom PS | |
| WV-1018 | GCUGCAACCTG | 1804 | mG*mC*mU*mG*mC*A*A | 2156 | XXXXXXXXX | 5-10-5 (2′-OMe- | HTT-rs362306 |
| | GCAACAACC | | *C*C*T*G*G*C*A*A*mC* | | XXXXXXXXXX | DNA-2′-OMe); | |
| | | | mA*mA*mC*mC | | | stereorandom PS | |
| WV-1019 | GAGCAGCTGCA | 1805 | mG*mA*mG*mC*mA*mG* | 2157 | XXXXXXXXX | 7-7-6 (2′-OMe- | HTT-rs362306 |
| | ACCUGGCAA | | mC*T*G*C*A*A*C*C*mU* | | XXXXXXXXX | DNA-2′-OMe); | |
| | | | mG*mG*mC*mA*mA | | | stereorandom PS | |
| WV-1020 | GAGCAGCTGCA | 1806 | mGmAmGmCmAmGmC*T* | 2158 | OOOOOOXXX | 7-7-6 (2′-OMe- | HTT-rs362306 |
| | ACCUGGCAA | | G*C*A*A*C*C*mUmGmG | | XXXXXOOOOO | DNA-2′-OMe); | |
| | | | mCmAmA | | | stereorandom PS; | |
| | | | | | | PO in wings | |
| WV-1021 | AGCAGCTGCAA | 1807 | mA*mG*mC*mA*mG*mC* | 2159 | XXXXXXXXX | 6-7-5 (2′-OMe- | HTT-rs362306 |
| | CCTGGCAAC | | T*G*C*A*A*C*C*T*G*mG | | XXXXXXXXXX | DNA-2′-OMe); | |
| | | | *mC*mA*mA*mC | | | stereorandom PS | |
| WV-1022 | AGCAGCTGCAA | 1808 | mAmGmCmAmGmC*T*G* | 2160 | OOOOOXXXX | 6-7-5 (2′-OMe- | HTT-rs362306 |
| | CCTGGCAAC | | C*A*A*C*C*T*G*mGmCm | | XXXXXXOOOO | DNA-2′-OMe); | |
| | | | AmAmC | | | stereorandom PS; | |
| | | | | | | PO in the wings | |
| WV-1023 | GCAGCTGCAAC | 1809 | mG*mC*mA*mG*mC*T*G* | 2161 | XXXXXXXXX | 5-7-8 (2′-OMe- | HTT-rs362306 |
| | CUGGCAACA | | C*A*A*C*C*mU*mG*mG* | | XXXXXXXXXX | DNA-2′-OMe); | |
| | | | mC*mA*mA*mC*mA | | | stereorandom PS | |
| WV-1024 | GCAGCTGCAAC | 1810 | mGmCmAmGmC*T*G*C*A | 2162 | OOOOXXXXX | 5-7-8 (2′-OMe- | HTT-rs362306 |
| | CUGGCAACA | | *A*C*C*mUmGmGmCmAm | | XXXOOOOOOO | DNA-2′-OMe); | |
| | | | AmCmA | | | stereorandom PS; | |
| | | | | | | PO in the wings | |
| WV-1025 | GAGCAGCTGCA | 1811 | mGmAmGmCmA*G*C*T*G | 2163 | OOOOXXXXX | 5-10-5 (2′-OMe- | HTT-rs362306 |
| | ACCTGGCAA | | *C*A*A*C*C*T*mGmGmC | | XXXXXXOOOO | DNA-2′-OMe); | |
| | | | mAmA | | | stereorandom PS; | |
| | | | | | | PO in the wings | |
| WV-1026 | AGCAGCTGCAA | 1812 | mAmGmCmAmG*C*T*G*C | 2164 | OOOOXXXXX | 5-10-5 (2′-OMe- | HTT-rs362306 |
| | CCTGGCAAC | | *A*A*C*C*T*G*mGmCmA | | XXXXXXOOOO | DNA-2′-OMe); | |
| | | | mAmC | | | stereorandom PS; | |
| | | | | | | PO in the wings | |
| WV-1027 | GCAGCTGCAAC | 1813 | mGmCmAmGmCT*G*C*A* | 2165 | OOOOOXXXX | 5-10-5 (2′-OMe- | HTT-rs362306 |
| | CTGGCAACA | | A*C*C*T*G*G*mCmAmA | | XXXXXXOOOO | DNA-2′-OMe); | |
| | | | mCmA | | | stereorandom PS; | |
| | | | | | | PO in the wings | |
| WV-1028 | CAGCUGCAACC | 1814 | mCmAmGmCmU*G*C*A*A | 2166 | OOOOXXXXX | 5-10-5 (2′-OMe- | HTT-rs362306 |
| | TGGCAACAA | | *C*C*T*G*G*C*mAmAmC | | XXXXXXOOOO | DNA-2′-OMe); | |
| | | | mAmA | | | stereorandom PS; | |
| | | | | | | PO in the wings | |
| WV-1029 | AGCUGCAACCT | 1815 | mAmGmCmUmG*C*A*A*C | 2167 | OOOOXXXXX | 5-10-5 (2′-OMe- | HTT-rs362306 |
| | GGCAACAAC | | *C*T*G*G*C*A*mAmCmA | | XXXXXXOOOO | DNA-2′-OMe); | |
| | | | mAmC | | | stereorandom PS; | |
| | | | | | | PO in the wings | |
| WV-1030 | GCUGCAACCTG | 1816 | mGmCmUmGmC*A*A*C*C | 2168 | OOOOXXXXX | 5-10-5 (2′-OMe- | HTT-rs362306 |
| | GCAACAACC | | *T*G*G*C*A*A*mCmAmA | | XXXXXXOOOO | DNA-2′-OMe); | |
| | | | mCmC | | | stereorandom PS; | |
| | | | | | | PO in the wings | |
| WV-1031 | GGGCCAACAGC | 1817 | G*G*G*C*C*A*A*C*A*G* | 2169 | XXXXXXXXX | All DNA; | HTT-rs362268 |
| | CAGCCTGCA | | C*C*A*G*C*C*T*G*C*A | | XXXXXXXXXX | stereorandom PS | |
| WV-1032 | GGCCAACAGCC | 1818 | G*G*C*C*A*A*C*A*G*C* | 2170 | XXXXXXXXX | All DNA; | HTT-rs362268 |
| | AGCCTGCAG | | C*A*G*C*C*T*G*C*A*G | | XXXXXXXXXX | stereorandom PS | |
| WV-1033 | GCCAACAGCCA | 1819 | G*C*C*A*A*C*A*G*C*C* | 2171 | XXXXXXXXX | All DNA; | HTT-rs362268 |
| | GCCTGCAGG | | A*G*C*C*T*G*C*A*G*G | | XXXXXXXXXX | stereorandom PS | |
| WV-1034 | CCAACAGCCAG | 1820 | C*C*A*A*C*A*G*C*C*A* | 2172 | XXXXXXXXX | All DNA; | HTT-rs362268 |
| | CCTGCAGGA | | G*C*C*T*G*C*A*G*G*A | | XXXXXXXXXX | stereorandom PS | |
| WV-1035 | CAACAGCCAGC | 1821 | C*A*A*C*A*G*C*C*A*G* | 2173 | XXXXXXXXX | All DNA; | HTT-rs362268 |
| | CTGCAGGAG | | C*C*T*G*C*A*G*G*A*G | | XXXXXXXXXX | stereorandom PS | |
| WV-1036 | AACAGCCAGCC | 1822 | A*A*C*A*G*C*C*A*G*C* | 2174 | XXXXXXXXX | All DNA; | HTT-rs362268 |
| | TGCAGGAGG | | C*T*G*C*A*G*G*A*G*G | | XXXXXXXXXX | stereorandom PS | |
| WV-1037 | GGGCCAACAGC | 1823 | mG*mG*mG*mC*mC*A*A | 2175 | XXXXXXXXX | 5-15 (2′-OMe- | HTT-rs362268 |
| | CAGCCTGCA | | *C*A*G*C*C*A*G*C*C*T | | XXXXXXXXXX | DNA); | |
| | | | *G*C*A | | | stereorandom PS | |
| WV-1038 | GGCCAACAGCC | 1824 | mG*mG*mC*mC*mA*A*C* | 2176 | XXXXXXXXX | 5-15 (2′-OMe- | HTT-rs362268 |
| | AGCCTGCAG | | A*G*C*C*A*G*C*C*T*G* | | XXXXXXXXXX | DNA); | |
| | | | C*A*G | | | stereorandom PS | |
| WV-1039 | GCCAACAGCCA | 1825 | mG*mC*mC*mA*mA*C*A* | 2177 | XXXXXXXXX | 5-15 (2′-OMe- | HTT-rs362268 |
| | GCCTGCAGG | | G*C*C*A*G*C*C*T*G*C* | | XXXXXXXXXX | DNA); | |
| | | | A*G*G | | | stereorandom PS | |
| WV-1040 | CCAACAGCCAG | 1826 | mC*mC*mA*mA*mC*A*G* | 2178 | XXXXXXXXX | 5-15 (2′-OMe- | HTT-rs362268 |
| | CCTGCAGGA | | C*C*A*G*C*C*T*G*C*A* | | XXXXXXXXXX | DNA); | |
| | | | G*G*A | | | stereorandom PS | |
| WV-1041 | CAACAGCCAGC | 1827 | mC*mA*mA*mC*mA*G*C* | 2179 | XXXXXXXXX | 5-15 (2′-OMe- | HTT-rs362268 |
| | CTGCAGGAG | | C*A*G*C*C*T*G*C*A*G* | | XXXXXXXXXX | DNA); | |
| | | | G*A*G | | | stereorandom PS | |
| WV-1042 | AACAGCCAGCC | 1828 | mA*mA*mC*mA*mG*C*C* | 2180 | XXXXXXXXX | 5-15 (2′-OMe- | HTT-rs362268 |
| | TGCAGGAGG | | A*G*C*C*T*G*C*A*G*G* | | XXXXXXXXXX | DNA); | |
| | | | A*G*G | | | stereorandom PS | |
| WV-1043 | GGGCCAACAGC | 1829 | mG*mG*mG*mC*mC*A*A | 2181 | XXXXXXXXX | 5-10-5 (2′-OMe- | HTT-rs362268 |
| | CAGCCUGCA | | *C*A*G*C*C*A*G*C*mC* | | XXXXXXXXXX | DNA-2′-OMe); | |
| | | | mU*mG*mC*mA | | | stereorandom PS | |
| WV-1044 | GGCCAACAGCC | 1830 | mG*mG*mC*mC*mA*A*C* | 2182 | XXXXXXXXX | 5-10-5 (2′-OMe- | HTT-rs362268 |
| | AGCCUGCAG | | A*G*C*C*A*G*C*C*mU* | | XXXXXXXXXX | DNA-2′-OMe); | |
| | | | mG*mC*mA*mG | | | stereorandom PS | |
| WV-1045 | GCCAACAGCCA | 1831 | mG*mC*mC*mA*mA*C*A* | 2183 | XXXXXXXXX | 5-10-5 (2′-OMe- | HTT-rs362268 |
| | GCCTGCAGG | | G*C*C*A*G*C*C*T*mG*m | | XXXXXXXXXX | DNA-2′-OMe); | |
| | | | C*mA*mG*mG | | | stereorandom PS | |
| WV-1046 | CCAACAGCCAG | 1832 | mC*mC*mA*mA*mC*A*G* | 2184 | XXXXXXXXX | 5-10-5 (2′-OMe- | HTT-rs362268 |
| | CCTGCAGGA | | C*C*A*G*C*C*T*G*mC*m | | XXXXXXXXXX | DNA-2′-OMe); | |
| | | | A*mG*mG*mA | | | stereorandom PS | |
| WV-1047 | CAACAGCCAGC | 1833 | mC*mA*mA*mC*mA*G*C* | 2185 | XXXXXXXXX | 5-10-5 (2′-OMe- | HTT-rs362268 |
| | CTGCAGGAG | | C*A*G*C*C*T*G*C*mA*m | | XXXXXXXXXX | DNA-2′-OMe); | |
| | | | G*mG*mA*mG | | | stereorandom PS | |
| WV-1048 | AACAGCCAGCC | 1834 | mA*mA*mC*mA*mG*C*C* | 2186 | XXXXXXXXX | 5-10-5 (2′-OMe- | HTT-rs362268 |
| | TGCAGGAGG | | A*G*C*C*T*G*C*A*mG*m | | XXXXXXXXXX | DNA-2′-OMe); | |
| | | | G*mA*mG*mG | | | stereorandom PS | |
| WV-1049 | GGGCCAACAGC | 1835 | mG*mG*mG*mC*mC*mA* | 2187 | XXXXXXXXX | 7-7-6 (2′-OMe- | HTT-rs362268 |
| | CAGCCUGCA | | mA*C*A*G*C*C*A*G*mC | | XXXXXXXXXX | DNA-2′-OMe); | |
| | | | *mC*mU*mG*mC*mA | | | stereorandom PS | |
| WV-1050 | GGGCCAACAGC | 1836 | mGmGmGmCmCmAmA*C* | 2188 | OOOOOOXXX | 7-7-6 (2′-OMe- | HTT-rs362268 |
| | CAGCCUGCA | | A*G*C*C*A*G*mCmCmU | | XXXXXOOOOO | DNA-2′-OMe); | |
| | | | mGmCmA | | | stereorandom PS; | |
| | | | | | | PO in wings | |
| WV-1051 | GGCCAACAGCC | 1837 | mG*mG*mC*mC*mA*mA* | 2189 | XXXXXXXXX | 6-7-5 (2′-OMe- | HTT-rs362268 |
| | AGCCUGCAG | | C*A*G*C*C*A*G*C*C*mU | | XXXXXXXXX | DNA-2′-OMe); | |
| | | | *mG*mC*mA*mG | | | stereorandom PS | |
| WV-1052 | GGCCAACAGCC | 1838 | mGmGmCmCmAmA*C*A* | 2190 | OOOOOXXXX | 6-7-5 (2′-OMe- | HTT-rs362268 |
| | AGCCUGCAG | | G*C*C*A*G*C*C*mUmGm | | XXXXXXOOOO | DNA-2′-OMe); | |
| | | | CmAmG | | | stereorandom PS; | |
| | | | | | | PO in the wings | |
| WV-1053 | GCCAACAGCCA | 1839 | mG*mC*mC*mA*mA*C*A* | 2191 | XXXXXXXXX | 5-7-8 (2′-OMe- | HTT-rs362268 |
| | GCCUGCAGG | | G*C*C*A*G*mC*mC*mU* | | XXXXXXXXXX | DNA-2′-OMe); | |
| | | | mG*mC*mA*mG*mG | | | stereorandom PS | |
| WV-1054 | GCCAACAGCCA | 1840 | mGmCmCmAmA*C*A*G*C | 2192 | OOOOXXXXX | 5-7-8 (2′-OMe- | HTT-rs362268 |
| | GCCUGCAGG | | *C*A*G*mCmCmUmGmCm | | XXXOOOOOOO | DNA-2′-OMe); | |
| | | | AmGmG | | | stereorandom PS; | |
| | | | | | | PO in the wings | |
| WV-1055 | GGGCCAACAGC | 1841 | mGmGmGmCmC*A*A*C*A | 2193 | OOOOXXXXX | 5-10-5 (2′-OMe- | HTT-rs362268 |
| | CAGCCUGCA | | *G*C*C*A*G*C*mCmUmG | | XXXXXXOOOO | DNA-2′-OMe); | |
| | | | mCmA | | | stereorandom PS; | |
| | | | | | | PO in the wings | |
| WV-1056 | GGCCAACAGCC | 1842 | mGmGmCmCmA*A*C*A*G | 2194 | OOOOXXXXX | 5-10-5 (2′-OMe- | DNA-2′-OMe); |
| | AGCCUGCAG | | *C*C*A*G*C*C*mUmGmC | | XXXXXXOOOO | DNA-2′-OMe); | |
| | | | mAmG | | | stereorandom PS; | |
| | | | | | | PO in the wings | |
| WV-1057 | GCCAACAGCCA | 1843 | mGmCmCmAmA*C*A*G*C | 2195 | OOOOXXXXX | 5-10-5 (2′-OMe- | HTT-rs362268 |
| | GCCTGCAGG | | *C*A*G*C*C*T*mGmCmA | | XXXXXXOOOO | DNA-2′-OMe); | |
| | | | mGmG | | | stereorandom PS; | |
| | | | | | | PO in the wings | |
| WV-1058 | CCAACAGCCAG | 1844 | mCmCmAmAmC*A*G*C*C | 2196 | OOOOXXXXX | 5-10-5 (2′-OMe- | HTT-rs362268 |
| | CCTGCAGGA | | *A*G*C*C*T*G*mCmAmG | | XXXXXXOOOO | DNA-2′-OMe); | |
| | | | mGmA | | | stereorandom PS; | |
| | | | | | | PO in the wings | |
| WV-1059 | CAACAGCCAGC | 1845 | mCmAmAmCmA*G*C*C*A | 2197 | OOOOXXXXX | 5-10-5 (2′-OMe- | HTT-rs362268 |
| | CTGCAGGAG | | *G*C*C*T*G*C*mAmGmG | | XXXXXXOOOO | DNA-2′-OMe); | |
| | | | mAmG | | | stereorandom PS; | |
| | | | | | | PO in the wings | |
| WV-1060 | AACAGCCAGCC | 1846 | mAmAmCmAmG*C*C*A*G | 2198 | OOOOXXXXX | 5-10-5 (2′-OMe- | HTT-rs362268 |
| | TGCAGGAGG | | *C*C*T*G*C*A*mGmGmA | | XXXXXXOOOO | DNA-2′-OMe); | |
| | | | mGmG | | | stereorandom PS; | |
| | | | | | | PO in the wings: | |
| WV-1061 | GUAGGAGTAGT | 1847 | mG*mU*mA*mG*mG*A*G | 2199 | XXXXXXXXX | 5-10-5 (2′-OMe- | HTT-rs362268 |
| | GAAAGGCCA | | *T*A*G*T*G*A*A*A*mG* | | XXXXXXXXXX | DNA-2′-OMe); | |
| | | | mG*mC*mC*mA | | | stereorandom PS: | |
| | | | | | | +ve Luciferase | |
| | | | | | | control for | |
| | | | | | | psiCHECK2; | |
| | | | | | | WV-975 | |
| | | | | | | analogue | |
| WV-1062 | GUAGGAGTAGT | 1848 | mGmUmAmGmG*A*G*T*A | 2200 | OOOOXXXXX | 5-10-5 (2′-OMe- | HTT-control |
| | GAAAGGCCA | | *G*T*G*A*A*A*mGmGmC | | XXXXXXOOOO | DNA-2′-OMe); | |
| | | | mCmA | | | stereorandom PS; | |
| | | | | | | PO in the wings: | |
| | | | | | | +ve Luciferase | |
| | | | | | | control for | |
| | | | | | | psiCHECK2; | |
| | | | | | | WV-975 | |
| | | | | | | analogue | |
| WV-1063 | GUAGGAGTAGT | 1849 | mG*mU*mA*mG*mG*A*G | 2201 | XXXXXXXXX | 5-15 (2′-OMe- | HTT-control |
| | GAAAGGCCA | | *T*A*G*T*G*A*A*A*G*G | | XXXXXXXXXX | DNA); | |
| | | | *C*C*A | | | stereorandom PS: | |
| | | | | | | +ve Luciferase | |
| | | | | | | control for | |
| | | | | | | psiCHECK2; | |
| | | | | | | WV-975 | |
| | | | | | | analogue | |
| WV-1064 | CUCUUACTGTG | 1850 | mC*mU*mC*mU*mU*A*C* | 2202 | XXXXXXXXX | 5-10-5 (2′-OMe- | HTT-control |
| | CTGTGGACA | | T*G*T*G*C*T*G*T*mG*m | | XXXXXXXXXX | DNA-2′-OMe); | |
| | | | G*mA*mC*mA | | | stereorandom PS: | |
| | | | | | | Negative | |
| | | | | | | Luciferase | |
| | | | | | | control for | |
| | | | | | | psiCHECK2; | |
| | | | | | | ONT-67 | |
| | | | | | | analogue | |
| WV-1065 | CUCUUACTGTG | 1851 | mCmUmCmUmU*A*C*T*G | 2203 | OOOOXXXXX | 5-10-5 (2′-OMe- | HTT-control |
| | CTGTGGACA | | *T*G*C*T*G*T*mGmGmA | | XXXXXXOOO | DNA-2′-OMe); | |
| | | | mCmA | | | stereorandom PS; | |
| | | | | | | PO in the wings: | |
| | | | | | | Negative | |
| | | | | | | Luciferase | |
| | | | | | | control for | |
| | | | | | | psiCHECK2; | |
| | | | | | | ONT-67 | |
| | | | | | | analogue | |
| WV-1066 | CUCUUACTGTG | 1852 | mC*mU*mC*mU*mU*A*C* | 2204 | XXXXXXXXX | 5-15 (2′-OMe- | HTT-control |
| | CTGTGGACA | | T*G*T*G*C*T*G*T*G*G* | | XXXXXXXXXX | DNA); | |
| | | | A*C*A | | | stereorandom PS: | |
| | | | | | | Negative | |
| | | | | | | Luciferase | |
| | | | | | | control for | |
| | | | | | | psiCHECK2; | |
| | | | | | | ONT-67 | |
| | | | | | | analogue | |
| WV-1067 | GGGCACAAGG | 1853 | G*G*G*C*A*C*A*A*G*G* | 2205 | XXXXXXXXX | All DNA | HTT-control |
| | GCACAGACTT | | G*C*d2AP*C*A*G*A*C*T*T | | XXXXXXXXXX | stereorandom; | |
| | | | | | | P13 (2- | |
| | | | | | | aminopurine): | |
| | | | | | | rs362307; WV- | |
| | | | | | | 904 analogue | |
| WV-1068 | GGCACAAGGGC | 1854 | G*G*C*A*C*A*A*G*G*G* | 2206 | XXXXXXXXX | All DNA | rs362307 |
| | ACAGACTTC | | C*d2AP*C*A*G*A*C*T*T*C | | XXXXXXXXXX | stereorandom; | |
| | | | | | | P12 (2- | |
| | | | | | | aminopurine): | |
| | | | | | | rs362307; WV- | |
| | | | | | | 905 analogue | |
| WV-1069 | GCACAAGGGCA | 1855 | G*C*A*C*A*A*G*G*G*C* | 2207 | XXXXXXXXX | All DNA | rs362307 |
| | CAGACTTCC | | d2AP*C*A*G*A*C*T*T*C*C | | XXXXXXXXXX | stereorandom; | |
| | | | | | | P11 (2- | |
| | | | | | | aminopurine): | |
| | | | | | | rs362307; WV- | |
| | | | | | | 906 analogue | |
| WV-1070 | GGGCACAAGG | 1856 | G*G*G*C*A*C*A*A*G*G* | 2208 | XXXXXXXXX | All DNA | rs362307 |
| | GCACAGACTT | | G*C*dDAP*C*A*G*A*C*T | | XXXXXXXXXX | stereorandom; | |
| | | | *T | | | P13 (2; 6- | |
| | | | | | | diaminopurine): | |
| | | | | | | rs362307; WV- | |
| | | | | | | 904 analogue | |
| WV-1071 | GGCACAAGGGC | 1857 | G*G*C*A*C*A*A*G*G*G* | 2209 | XXXXXXXXX | All DNA | rs362307 |
| | ACAGACTTC | | C*dDAP*C*A*G*A*C*T*T | | XXXXXXXXXx | stereorandom; | |
| | | | *C | | | P12 (2; 6- | |
| | | | | | | diaminopurine): | |
| | | | | | | rs362307; WV- | |
| | | | | | | 905 analogue | |
| WV-1072 | GCACAAGGGCA | 1858 | G*C*A*C*A*A*G*G*G*C* | 2210 | XXXXXXXXX | All DNA | rs362307 |
| | CAGACTTCC | | dDAP*C*A*G*A*C*T*T*C | | XXXXXXXXXX | stereorandom; | |
| | | | *C | | | P12 (2;6- | |
| | | | | | | diaminopurine): | |
| | | | | | | rs362307; WV- | |
| | | | | | | 906 analogue | |
| WV-1073 | GAGCCUUUGG | 1859 | rGrArGrCrCrUrUrUrGrGrAr | 2211 | OOOOOOOOO | wtRNA | rs362307 |
| | AAGUCUGCGCC | | ArGrUrCrUrGrCrGrCrCrCrU | | OOOOOOOOO | | |
| | CUUGUGCCCUG | | rUrGrUrGrCrCrCrUrGrCrCrU | | OOOOOOOOO | | |
| | CCU | | | | OOOOOOO | | |
| WV-1074 | GAGCCUUUGG | 1860 | rGrArGrCrCrUrUrUrGrGrAr | 2212 | OOOOOOOOO | muRNA | rs362307 |
| | AAGUCUGUGCC | | ArGrUrCrUrGrUrGrCrCrCrU | | OOOOOOOOO | | |
| | CUUGUGCCCUG | | rUrGrUrGrCrCrCrUrGrCrCrU | | OOOOOOOOO | | |
| | CCU | | | | OOOOOOO | | |
| WV-1075 | CACACGGGCAC | 1861 | rCrArCrArCrGrGrGrCrArCr | 2213 | OOOOOOOOO | Antisense strand: | rs362307 |
| | AGACUUCCAA | | ArGrArCrUrUrCrCrArA | | OOOOOOOOO | Positive control; | |
| | | | | | OO | Curr. Bio. Vol 19 | |
| | | | | | | No 9; 776 | |
| WV-1076 | GGAAGUCUGU | 1862 | rGrGrArArGrUrCrUrGrUrGr | 2214 | OOOOOOOOO | Sense strand: | rs362307 |
| | GCCCGUGUGCC | | CrCrCrGrUrGrUrGrCrC | | OOOOOOOOO | Positive control; | |
| | | | | | OO | Curr. Bio. Vol 19 | |
| | | | | | | No 9; 777: Note: | |
| | | | | | | incorrectly added | |
| | | | | | | as | |
| | | | | | | rGrGrArArGrUr | |
| | | | | | | CrUrGrUrGrCrC | |
| | | | | | | rCrGrUrGrUrUr | |
| | | | | | | CrC (SEQ ID | |
| | | | | | | NO: 2417) in | |
| | | | | | | earlier versions | |
| | | | | | | of databse | |
| WV-1077 | AUUAAUAAATT | 1863 | mA*SmU*SmU*SmA*SmA* | 2215 | SSSSSSSSSSSS | 6-10-4 (2′-OMe- | HTT rs7685686 |
| | GTCATCACC | | SmU*SA*SA*SA*ST*ST*S | | SRSSSSS | DNA-2′-OMe) | |
| | | | G*ST*SC*RA*ST*SmC*Sm | | | Gapmer: | |
| | | | A*SmC*SmC | | | Analogue of | |
| | | | | | | WV-451 | |
| WV-1078 | AUUAAUAAATT | 1864 | mA*RmU*RmU*RmA*RmA | 2216 | RRRRRSSSSSS | 6-10-4 (2′-OMe- | HTT rs7685686 |
| | GTCATCACC | | *RmU*SA*SA*SA*ST*ST* | | SSRSSRRR | DNA-2′-OMe) | |
| | | | SG*ST*SC*RA*ST*SmC*R | | | Gapmer: | |
| | | | mA*RmC*RmC | | | Analogue of | |
| | | | | | | WV-451 | |
| WV-1079 | AUUAAUAAATT | 1865 | mA*SmU*SmU*SmA*SmA* | 2217 | SSSSSSSSSSSS | 8-12 (2′-OMe- | HTT rs7685686 |
| | GTCATCACC | | SmU*SmA*SmA*SA*ST*ST | | SRSSSSS | DNA) hemimer: | |
| | | | *SG*ST*SC*RA*ST*SC*SA | | | Analogue of | |
| | | | *SC*SC | | | WV-451 | |
| WV-1080 | AUUAAUAAATT | 1866 | mA*RmU*RmU*RmA*RmA | 2218 | RRRRRRRSSSS | 8-12 (2′-OMe- | HTT rs7685686 |
| | GTCATCACC | | *RmU*RmA*RmA*SA*ST* | | SSRSSSSS | DNA) hemimer: | |
| | | | ST*SG*ST*SC*RA*ST*SC* | | | Analogue of | |
| | | | SA*SC*SC | | | WV-451 | |
| WV-1081 | AUUAAUAAATT | 1867 | mAmUmUmAmAmUmAmA | 2219 | OOOOOOOSSS | 8-12 (2′-OMe- | HTT rs7685686 |
| | GTCATCACC | | *SA*ST*ST*SG*ST*SC*RA | | SSSRSSSSS | DNA) hemimer; | |
| | | | *ST*SC*SA*SC*SC | | | PO wing: | |
| | | | | | | Analogue of | |
| | | | | | | WV-451 | |
| WV-1082 | AUUAAUAAATT | 1868 | mAmUmUmAmAmU*SA*S | 2220 | OOOOOSSSSSS | 6-10-4 (2′-OMe- | HTT rs7685686 |
| | GTCATCACC | | A*SA*ST*ST*SG*ST*SC*R | | SSRSSOOO | DNA-2′-OMe); | |
| | | | A*ST*SmCmAmCmC | | | PO wings: | |
| | | | | | | Analogue of | |
| | | | | | | WV-451 | |
| WV-1083 | AUUAAUAAATT | 1869 | mA*SmUmUmAmAmU*SA | 2221 | SOOOOSSSSSS | 6-10-4 (2′-OMe- | HTT rs7685686 |
| | GTCATCACC | | *SA*SA*ST*ST*SG*ST*SC | | SSRSSOOS | DNA-2′-OMe) | |
| | | | *RA*ST*SmCmAmC*SmC | | | Gapmer: | |
| | | | | | | Analogue of | |
| | | | | | | WV-451 | |
| WV-1084 | AUUAAUAAATT | 1870 | mA*RmUmUmAmAmU*SA | 2222 | ROOOOSSSSSS | 6-10-4 (2′-OMe- | HTT rs7685686 |
| | GTCATCACC | | *SA*SA*ST*ST*SG*ST*SC | | SSRSSOOR | DNA-2′-OMe) | |
| | | | *RA*ST*SmCmAmC*RmC | | | Gapmer: | |
| | | | | | | Analogue of | |
| | | | | | | WV-451 | |
| WV-1085 | GGCACAAGGGC | 1871 | mG*SmG*SmC*SmA*SmC* | 2223 | SSSSSSSSSSSS | 5-10-5 (2′-OMe- | HTT rs362307 |
| | ACAGACUUC | | SA*SA*SG*SG*SG*SC*SA | | RSSSSSS | DNA-2′-OMe) | |
| | | | *SC*RA*SG*SmA*SmC*Sm | | | Gapmer: | |
| | | | U*SmU*SmC | | | Analogue of | |
| | | | | | | WV-905 and | |
| | | | | | | WV-937 | |
| WV-1086 | GGCACAAGGGC | 1872 | mG*RmG*RmC*RmA*RmC | 2224 | RRRRSSSSSSS | 5-10-5 (2′-OMe- | HTT rs362307 |
| | ACAGACUUC | | *SA*SA*SG*SG*SG*SC*S | | SRSSRRRR | DNA-2′-OMe) | |
| | | | A*SC*RA*SG*SmA*RmC* | | | Gapmer: | |
| | | | RmU*RmU*RmC | | | Analogue of | |
| | | | | | | WV-905 and | |
| | | | | | | WV-937 | |
| WV-1087 | GGCACAAGGGC | 1873 | mGmGmCmAmC*SA*SA*S | 2225 | OOOOSSSSSSS | 5-10-5 (2′-OMe- | HTT rs362307 |
| | ACAGACUUC | | G*SG*SG*SC*SA*SC*RA* | | SRSSOOOO | DNA-2′-OMe); | |
| | | | SG*SmAmCmUmUmC | | | PO wings: | |
| | | | | | | Analogue of | |
| | | | | | | WV-905 and | |
| | | | | | | WV-937 | |
| WV-1088 | GGCACAAGGGC | 1874 | mG*SmG*SmC*SmA*SmC* | 2226 | SSSSSSSSSSSS | 8-12 (2′-OMe- | HTT rs362307 |
| | ACAGACTTC | | SmA*SmA*SmG*SG*SG*S | | RSSSSSS | DNA) hemimer: | |
| | | | C*SA*SC*RA*SG*SA*SC* | | | Analogue of | |
| | | | ST*ST*SC | | | WV-905 and | |
| | | | | | | WV-937 | |
| WV-1089 | GGCACAAGGGC | 1875 | mG*RmG*RmC*RmA*RmC | 2227 | RRRRRRRSSSS | 8-12 (2′-OMe- | HTT rs362307 |
| | ACAGACTTC | | *RmA*RmA*RmG*SG*SG* | | SRSSSSSS | DNA) hemimer: | |
| | | | SC*SA*SC*RA*SG*SA*SC | | | Analogue of | |
| | | | *ST*ST*SC | | | WV-905 and | |
| | | | | | | WV-937 | |
| WV-1090 | GGCACAAGGGC | 1876 | mGmGmCmAmCmAmAmG | 2228 | OOOOOOOSSS | 8-12 (2′-OMe- | HTT rs362307 |
| | ACAGACTTC | | *SG*SG*SC*SA*SC*RA*S | | SSRSSSSSS | DNA) hemimer; | |
| | | | G*SA*SC*ST*ST*SC | | | PO wing: | |
| | | | | | | Analogue of | |
| | | | | | | WV-905 and | |
| | | | | | | WV-937 | |
| WV-1091 | GGCACAAGGGC | 1877 | mG*RmGmCmAmC*SA*SA | 2229 | ROOOSSSSSSS | 8-12 (2′-OMe- | HTT rs362307 |
| | ACAGACUUC | | *SG*SG*SG*SC*SA*SC*R | | SRSSOOOR | DNA) gapmer | |
| | | | A*SG*SmAmCmUmU*RmC | | | PO wing: | |
| | | | | | | Analogue of | |
| | | | | | | WV-905 and | |
| | | | | | | WV-937: | |
| | | | | | | incorrectly added | |
| | | | | | | as | |
| | | | | | | gsSgcacsSdAsSd | |
| | | | | | | AsSdGsSdGsSd | |
| | | | | | | GsSdCsSdAsSd | |
| | | | | | | CsRdAsSdGsSac | |
| | | | | | | uusSc (SEQ ID | |
| | | | | | | NO: 2418) in | |
| | | | | | | earlier version of | |
| | | | | | | database | |
| WV-1092 | GGCACAAGGGC | 1878 | mG*SmGmCmAmC*SA*SA | 2230 | SOOOSSSSSSS | 8-12 (2′-OMe- | HTT rs362307 |
| | ACAGACUUC | | *SG*SG*SG*SC*SA*SC*R | | SRSSOOOS | DNA) gapmer | |
| | | | A*SG*SmAmCmUmU*SmC | | | PO wing: | |
| | | | | | | Analogue of | |
| | | | | | | WV-905 and | |
| | | | | | | WV-937 | |
| WV-1183 | GCAGGGCACAA | 1879 | G*C*A*G*G*G*C*A*C*A* | 2231 | XXXXXXXXX | Phosphorothioate | Huntington |
| | GGGCACAGA | | A*G*G*G*C*A*C*A*G*A | | XXXXXXXXXX | DNA; | rs362307 |
| | | | | | | Stereorandom | |
| WV-1184 | GCAGGGCACAA | 1880 | mG*mC*mA*mG*mG*G*C | 2232 | XXXXXXXXX | 5-15 (2′-OMe- | Huntington |
| | GGGCACAGA | | *A*C*A*A*G*G*G*C*A*C | | XXXXXXXXXX | DNA) Hemimer | rs362307 |
| | | | *A*G*A | | | | |
| WV-1185 | GCAGGGCACAA | 1881 | mGmCmAmGmG*G*C*A*C | 2233 | OOOOXXXXX | 5-15 (2′-OMe- | Huntington |
| | GGGCACAGA | | *A*A*G*G*G*C*A*C*A*G | | XXXXXXXXXX | DNA) Hemimer; | rs362307 |
| | | | *A | | | PO wing | |
| WV-1186 | GCAGGGCACAA | 1882 | mG*mC*mA*mG*mG*mG* | 2234 | XXXXXXXXX | 7-13 (2′-OMe- | Huntington |
| | GGGCACAGA | | mC*A*C*A*A*G*G*G*C* | | XXXXXXXXXX | DNA) Hemimer | rs362307 |
| | | | A*C*A*G*A | | | | |
| WV-1187 | GCAGGGCACAA | 1883 | mGmCmAmGmGmGmC*A* | 2235 | OOOOOOXXX | 7-13 (2′-OMe- | Huntington |
| | GGGCACAGA | | C*A*A*G*G*G*C*A*C*A* | | XXXXXXXXXX | DNA) Hemimer; | rs362307 |
| | | | G*A | | | PO wing | |
| WV-1188 | CAGGGCACAAG | 1884 | C*A*G*G*G*C*A*C*A*A* | 2236 | XXXXXXXXX | Phosphorothioate | Huntington |
| | GGCACAGAC | | G*G*G*C*A*C*A*G*A*C | | XXXXXXXXXX | DNA; | rs362307 |
| | | | | | | Stereorandom | |
| WV-1189 | CAGGGCACAAG | 1885 | mC*mA*mG*mG*mG*C*A | 2237 | XXXXXXXXX | 5-15 (2′-OMe- | Huntington |
| | GGCACAGAC | | *C*A*A*G*G*G*C*A*C*A | | XXXXXXXXXX | DNA) Hemimer | rs362307 |
| | | | *G*A*C | | | | |
| WV-1190 | CAGGGCACAAG | 1886 | mCmAmGmGmG*C*A*C*A | 2238 | OOOOXXXXX | 5-15 (2′-OMe- | Huntington |
| | GGCACAGAC | | *A*G*G*G*C*A*C*A*G*A | | XXXXXXXXXX | DNA) Hemimer; | rs362307 |
| | | | *C | | | PO wing | |
| WV-1191 | CAGGGCACAAG | 1887 | mC*mA*mG*mG*mG*mC* | 2239 | XXXXXXXXX | 7-13 (2′-OMe- | Huntington |
| | GGCACAGAC | | mA*C*A*A*G*G*G*C*A* | | XXXXXXXXXX | DNA) Hemimer | rs362307 |
| | | | mC*mA*mG*mA*mC | | | | |
| WV-1192 | CAGGGCACAAG | 1888 | mCmAmGmGmGmCmA*C* | 2240 | OOOOOOXXX | 7-13 (2′-OMe- | Huntington |
| | GGCACAGAC | | A*A*G*G*G*C*A*mCmAm | | XXXXXXOOOO | DNA) Hemimer; | rs362307 |
| | | | GmAmC | | | PO wing | |
| WV-1193 | AGGGCACAAG | 1889 | A*G*G*G*C*A*C*A*A*G* | 2241 | XXXXXXXXX | Phosphorothioate | Huntington |
| | GGCACAGACT | | G*G*C*A*C*A*G*A*C*T | | XXXXXXXXXX | DNA; | rs362307 |
| | | | | | | Stereorandom | |
| WV-1194 | AGGGCACAAG | 1890 | mA*mG*mG*mG*mC*A*C | 2242 | XXXXXXXXX | 5-15 (2′-OMe- | Huntington |
| | GGCACAGACT | | *A*A*G*G*G*C*A*C*A*G | | XXXXXXXXXX | DNA) Hemimer | rs362307 |
| | | | *A*C*T | | | | |
| WV-1195 | AGGGCACAAG | 1891 | mAmGmGmGmC*A*C*A*A | 2243 | OOOOXXXXX | 5-15 (2′-OMe- | Huntington |
| | GGCACAGACT | | *G*G*G*C*A*C*A*G*A*C | | XXXXXXXXXX | DNA) Hemimer; | rs362307 |
| | | | *T | | | PO wing | |
| WV-1196 | AGGGCACAAG | 1892 | mA*mG*mG*mG*mC*mA* | 2244 | XXXXXXXXX | 7-12-1 (2′-OMe- | Huntington |
| | GGCACAGACU | | mC*A*A*G*G*G*C*A*C* | | XXXXXXXXXX | DNA-2′-DNA) | rs362307 |
| | | | A*G*A*C*mU | | | Gapmer | |
| WV-1197 | AGGGCACAAG | 1893 | mAmGmGmGmCmAmC*A* | 2245 | OOOOOOXXX | 7-12-1 (2′-OMe- | Huntington |
| | GGCACAGACU | | A*G*G*G*C*A*C*A*G*A* | | XXXXXXXXXX | DNA-2′-DNA) | rs362307 |
| | | | C*mU | | | Gapmer; PO | |
| | | | | | | wings | |
| WV-1198 | AAGGGCACAG | 1894 | A*A*G*G*G*C*A*C*A*G* | 2246 | XXXXXXXXX | Phosphorothioate | Huntington |
| | ACTTCCAAAG | | A*C*T*T*C*C*A*A*A*G | | XXXXXXXXXX | DNA | rs362307 |
| | | | | | | Stereorandom | |
| WV-1199 | AAGGGCACAG | 1895 | mA*mA*mG*mG*mG*C*A | 2247 | XXXXXXXXX | 5-15 (2′-OMe- | Huntington |
| | ACTTCCAAAG | | *C*A*G*A*C*T*T*C*C*A* | | XXXXXXXXXX | DNA) Hemimer | rs362307 |
| | | | A*A*G | | | | |
| WV-1200 | AAGGGCACAG | 1896 | mAmAmGmGmG*C*A*C*A | 2248 | OOOOXXXXX | 5-15 (2′-OMe- | Huntington |
| | ACTTCCAAAG | | *G*A*C*T*T*C*C*A*A*A | | XXXXXXXXXX | DNA) Hemimer; | rs362307 |
| | | | *G | | | PO wing | |
| WV-1201 | AAGGGCACAG | 1897 | mA*mA*mG*mG*mG*C*A | 2249 | XXXXXXXXX | 5-10-5 (2′-OMe- | Huntington |
| | ACTTCCAAAG | | *C*A*G*A*C*T*T*C*mC* | | XXXXXXXXXX | DNA-2′-DNA) | rs362307 |
| | | | mA*mA*mA*mG | | | Gapmer | |
| WV-1202 | AAGGGCACAG | 1898 | mAmAmGmGmG*C*A*C*A | 2250 | OOOOXXXXX | 5-10-5 (2′-OMe- | Huntington |
| | ACTTCCAAAG | | *G*A*C*T*T*C*mCmAmA | | XXXXXXOOOO | DNA-2′-DNA) | rs362307 |
| | | | mAmG | | | Gapmer; PO | |
| | | | | | | wings | |
| WV-1203 | AAGGGCACAG | 1899 | mA*mA*mG*mG*G*C*A*C | 2251 | XXXXXXXXX | 4-10-6 (2′-OMe- | Huntington |
| | ACTTCCAAAG | | *A*G*A*C*T*T*mC*mC*m | | XXXXXXXXXX | DNA-2′-DNA) | rs362307 |
| | | | A*mA*mA*mG | | | Gapmer | |
| WV-1204 | AAGGGCACAG | 1900 | mAmAmGmGG*C*A*C*A* | 2252 | OOOOXXXXX | 4-10-6 (2′-OMe- | Huntington |
| | ACTTCCAAAG | | G*A*C*T*T*mCmCmAmA | | XXXXXOOOOO | DNA-2′-DNA) | rs362307 |
| | | | mAmG | | | Gapmer; PO | |
| | | | | | | wings | |
| WV-1205 | AGGGCACAGAC | 1901 | A*G*G*G*C*A*C*A*G*A* | 2253 | XXXXXXXXX | Phosphorothioate | Huntington |
| | TTCCAAAGG | | C*T*T*C*C*A*A*A*G*G | | XXXXXXXXXX | DNA; | rs362307 |
| | | | | | | Stereorandom | |
| WV-1206 | AGGGCACAGAC | 1902 | mA*mG*mG*mG*mC*A*C | 2254 | XXXXXXXXX | 5-15 (2′-OMe- | Huntington |
| | TTCCAAAGG | | *A*G*A*C*T*T*C*C*A*A | | XXXXXXXXXX | DNA) Hemimer | rs362307 |
| | | | *A*G*G | | | | |
| WV-1207 | AGGGCACAGAC | 1903 | mAmGmGmGmC*A*C*A*G | 2255 | OOOOXXXXX | 5-15 (2′-OMe- | Huntington |
| | TTCCAAAGG | | *A*C*T*T*C*C*A*A*A*G | | XXXXXXXXXX | DNA) Hemimer; | rs362307 |
| | | | *G | | | PO wing | |
| WV-1208 | AGGGCACAGAC | 1904 | mA*mG*mG*mG*mC*A*C | 2256 | XXXXXXXXX | 5-10-5 (2′-OMe- | Huntington |
| | TTCCAAAGG | | *A*G*A*C*T*T*C*C*mA* | | XXXXXXXXXX | DNA-2′-DNA) | rs362307 |
| | | | mA*mA*mG*mG | | | Gapmer | |
| WV-1209 | AGGGCACAGAC | 1905 | mAmGmGmGmC*A*C*A*G | 2257 | OOOOXXXXX | 5-10-5 (2′-OMe- | Huntington |
| | TTCCAAAGG | | *A*C*T*T*C*C*mAmAmA | | XXXXXXOOOO | DNA-2′-DNA) | rs362307 |
| | | | mGmG | | | Gapmer; PO | |
| | | | | | | wings | |
| WV-1210 | AGGGCACAGAC | 1906 | mA*mG*mG*mG*C*A*C*A | 2258 | XXXXXXXXX | 4-10-6 (2′-OMe- | Huntington |
| | TTCCAAAGG | | *G*A*C*T*T*C*mC*mA*m | | XXXXXXXXXX | DNA-2′-DNA) | rs362307 |
| | | | A*mA*mG*mG | | | Gapmer | |
| WV-1211 | AGGGCACAGAC | 1907 | mAmGmGmG*C*A*C*A*G | 2259 | OOOXXXXXX | 4-10-6 (2′-OMe- | Huntington |
| | TTCCAAAGG | | *A*C*T*T*C*mCmAmAmA | | XXXXXOOOOO | DNA-2′-DNA) | rs362307 |
| | | | mGmG | | | Gapmer; PO | |
| | | | | | | wings | |
| WV-1212 | GGGCACAGACT | 1908 | G*G*G*C*A*C*A*G*A*C* | 2260 | XXXXXXXXX | Phosphorothioate | Huntington |
| | TCCAAAGGC | | T*T*C*C*A*A*A*G*G*C | | XXXXXXXXXX | DNA; | rs362307 |
| | | | | | | Stereorandom | |
| WV-1213 | GGGCACAGACT | 1909 | mG*mG*mG*mC*mA*C*A | 2261 | XXXXXXXXX | 4-16 (2′-OMe- | Huntington |
| | TCCAAAGGC | | *G*A*C*T*T*C*C*A*A*A | | XXXXXXXXXX | DNA) Hemimer | rs362307 |
| | | | *G*G*C | | | | |
| WV-1214 | GGGCACAGACT | 1910 | mGmGmGmCmA*C*A*G*A | 2262 | OOOOXXXXX | 4-16 (2′-OMe- | Huntington |
| | TCCAAAGGC | | *C*T*T*C*C*A*A*A*G*G | | XXXXXXXXXX | DNA) Hemimer; | rs362307 |
| | | | *C | | | PO wing | |
| WV-1215 | GGGCACAGACT | 1911 | mG*mG*mG*mC*mA*C*A | 2263 | XXXXXXXXX | 4-10-6 (2′-OMe- | Huntington |
| | TCCAAAGGC | | *G*A*C*T*T*C*C*A*mA* | | XXXXXXXXXX | DNA-2′-DNA) | rs362307 |
| | | | mA*mG*mG*mC | | | Gapmer | |
| WV-1216 | GGGCACAGACT | 1912 | mGmGmGmCmA*C*A*G*A | 2264 | OOOOXXXXX | 4-10-6 (2′-OMe- | Huntington |
| | TCCAAAGGC | | *C*T*T*C*C*A*mAmAmG | | XXXXXXOOOO | DNA-2′-DNA) | rs362307 |
| | | | mGmC | | | Gapmer; PO | |
| | | | | | | wings | |
| WV-1234 | GGCACAAGGGC | 1913 | mG*mG*mC*mA*mC*A*A | 2265 | XXXXXXXXX | 5-10-5 (2′-OMe- | HTT-rs362307 |
| | ACAGACUTC | | *G*G*G*C*A*C*A*G*mA* | | XXXXXXXXXX | DNA-2′-OMe) | |
| | | | mC*mU*BrdU*mC | | | Gapmer; One Br- | |
| | | | | | | dU | |
| WV-1235 | GGCACAAGGGC | 1914 | mG*mG*mC*mA*mC*A*A | 2266 | XXXXXXXXX | 5-10-5 (2′-OMe- | HTT-rs362307 |
| | ACAGACTTC | | *G*G*G*C*A*C*A*G*mA* | | XXXXXXXXXX | DNA-2′-OMe) | |
| | | | mC*BrdU*BrdU*mC | | | Gapmer; two Br- | |
| | | | | | | dU | |
| WV-1497 | GGCACAAGGGC | 1915 | mG*mGmCmAmC*A*A*G* | 2267 | XOOOXXXXX | stereo random | HTT rs362307 |
| | ACAGACUUC | | G*G*C*A*C*A*G*mAmCm | | XXXXXXOOOX | version of WV- | |
| | | | UmU*mC | | | 1092 | |
| WV-1508 | AUUAAUAAATT | 1916 | A*SmUmUmAmAmU*SA*S | 2268 | SOOOOSSSSSS | 1-5-10-3-1 | HTT rs7685686 |
| | GTCATCACC | | A*SA*ST*ST*SG*ST*SC*R | | SSRSSOOS | (DNA/2′-OMe) | |
| | | | A*ST*SmCmAmC*SC | | | Gapmer:: | |
| | | | | | | Analogue of | |
| | | | | | | WV-1083 | |
| WV-1509 | AUUAAUAAATT | 1917 | A*mUmUmAmAmU*A*A* | 2269 | XOOOOXXXX | 1-5-10-3-1 | HTT rs7685686 |
| | GTCATCACC | | A*T*T*G*T*C*A*T*mCmA | | XXXXXXXOOX | (DNA/2′-OMe) | |
| | | | mC*C | | | Gapmer; 1st and | |
| | | | | | | last PS:: | |
| | | | | | | Analogue of | |
| | | | | | | WV-1083 | |
| WV-1510 | GGCACAAGGGC | 1918 | G*SmGmCmAmC*SA*SA*S | 2270 | SOOOSSSSSSS | 1-4-10-4-1 | HTT rs362307 |
| | ACAGACUUC | | G*SG*SG*SC*SA*SC*RA* | | SRSSOOOS | (DNA/2′-OMe) | |
| | | | SG*SmAmCmUmU*SC | | | gapmer:: | |
| | | | | | | Analogue of | |
| | | | | | | WV-1092 | |
| WV-1511 | GGCACAAGGGC | 1919 | G*mGmCmAmC*A*A*G*G | 2271 | XOOOXXXXX | 1-4-10-4-1 | HTT rs362307 |
| | ACAGACUUC | | *G*C*A*C*A*G*mAmCmU | | XXXXXXOOOX | (DNA/2′-OMe) | |
| | | | mU*C | | | gapmer; 1st and | |
| | | | | | | last PS:: | |
| | | | | | | Analogue of | |
| | | | | | | WV-1092 | |
| WV-1654 | GGCACAAGGGC | 1920 | Geo*Geo*m5Ceo*Aeo*m5Ce | 2272 | XXXXXXXXX | 5-10-5; 2′- | HTT rs362307 |
| | ACAGACTTC | | o*A*A*G*G*G*C*A*C*A* | | XXXXXXXXXX | OMOE gapmer; | |
| | | | G*Aeo*m5Ceo*Teo*Teo*m5 | | | All PS | |
| | | | Ceo | | | | |
| WV-1655 | GGCACAAGGGC | 1921 | Geo*Geom5CeoAeom5Ceo* | 2273 | XOOOXXXXX | 5-10-5; 2′- | HTT rs362307 |
| | ACAGACTTC | | A*A*G*G*G*C*A*C*A*G* | | XXXXXXOOOX | OMOE gapmer; | |
| | | | Aeom5CeoTeoTeo*m5Ceo | | | 1st and last PS in | |
| | | | | | | the wing; rest of | |
| | | | | | | the wing is PO | |
| WV-1656 | CTCAGTAACAT | 1922 | m5Ceo*Teo*m5Ceo*Aeo*Ge | 2274 | XXXXXXXXX | 5-10-5; 2′- | Huntington |
| | TGACACCAC | | o*T*A*A*C*A*T*T*G*A*C | | XXXXXXXXXX | OMOE gapmer; | |
| | | | *Aeo*m5Ceo*m5Ceo*Aeo* | | | All PS | |
| | | | m5Ceo | | | | |
| WV-1657 | CUCAGTAACAT | 1923 | mC*mU*mC*mA*mG*T*A* | 2275 | XXXXXXXXX | 5-10-5; 2′-OMe | Huntington |
| | TGACACCAC | | A*C*A*T*T*G*A*C*mA*m | | XXXXXXXXXX | gapmer; All PS | |
| | | | C*mC*mA*mC | | | | |
| WV-1788 | GGCACAAGGGC | 1924 | mG*mGmCmAmC*A*A*G* | 2276 | XOOOXXXXX | 5/10/5 2′Ome | HTT |
| | ACAGACUTC | | G*G*C*A*C*A*G*mAmCm | | XXXXXXOOXX | Gapmer BrdU | |
| | | | U*BrdU*mC | | | PO wings | |
| WV-1789 | CTCAGTAACAT | 1925 | mC*BrdU*mC*mA*mG*T* | 2277 | XXXXXXXXX | 5/10/5 2′Ome | HTT |
| | TGACACCAC | | A*A*C*A*T*T*G*A*C*mA | | XXXXXXXXX | Gapmer BrdU | |
| | | | *mC*mC*mA*mC | | | | |
| WV-1790 | CTCAGTAACAT | 1926 | mC*BrdU*mCmAmG*T*A* | 2278 | XXOOXXXXX | 5/10/5 2′Ome | HTT |
| | TGACACCAC | | A*C*A*T*T*G*A*C*mAm | | XXXXXXOOOX | Gapmer BrdU | |
| | | | CmCmA*mC | | | PO wings | |
| WV-1799 | GAAGUCUGUG | 1927 | rGrArArGrUrCrUrGrUrGrCr | 2279 | OOOOOOOOO | RNA | HTT |
| | CCCUUGUGCC | | CrCrUrUrGrUrGrCrC | | OOOOOOOOOO | complementary | |
| | | | | | | to WV1092 | |
| WV-2022 | GGCACAAGGGC | 1928 | mG*SmGmCmAmC*SA*SA | 2280 | SOOOSSSSSSS | BrdU version of | HTT rs362307 |
| | ACAGACUTC | | *SG*SG*SG*SC*SA*SC*R | | SRSSOOSS | WV-1092 | |
| | | | A*SG*SmAmCmU*SBrdU* | | | | |
| | | | SmC | | | | |
| WV-2023 | TGTCATCACCA | 1929 | T*G*T*C*A*T*C*A*C*C* | 2281 | XXXXXXXXX | 15-5 hemimer | rs7685686 |
| | GAAAAAGUC | | A*G*A*A*A*mA*mA*mG* | | XXXXXXXXXX | full PS | (A/G) |
| | | | mU*mC | | | | |
| WV-2024 | UTGTCATCACC | 1930 | mU*T*G*T*C*A*T*C*A*C | 2282 | XXXXXXXXX | 1-14-5 gapmer | rs7685686 |
| | AGAAAAAGU | | *C*A*G*A*A*mA*mA*mA | | XXXXXXXXXX | full PS | (A/G) |
| | | | *mG*mU | | | | |
| WV-2025 | TTGTCATCACC | 1931 | T*T*G*T*C*A*T*C*A*C*C | 2283 | XXXXXXXXX | 15-5 hemimer | rs7685686 |
| | AGAAAAAGU | | *A*G*A*A*mA*mA*mA*m | | XXXXXXXXXX | full PS | (A/G) |
| | | | G*mU | | | | |
| WV-2026 | AUTGTCATCAC | 1932 | mA*mU*T*G*T*C*A*T*C* | 2284 | XXXXXXXXX | 2-13-5 gapmer | rs7685686 |
| | CAGAAAAAG | | A*C*C*A*G*A*mA*mA*m | | XXXXXXXXXX | full PS | (A/G) |
| | | | A*mA*mG | | | | |
| WV-2027 | ATTGTCATCAC | 1933 | mA*T*T*G*T*C*A*T*C*A | 2285 | XXXXXXXXX | 1-14-5 gapmer | rs7685686 |
| | CAGAAAAAG | | *C*C*A*G*A*mA*mA*mA | | XXXXXXXXXX | full PS | (A/G) |
| | | | *mA*mG | | | | |
| WV-2028 | AAUTGTCATCA | 1934 | mA*mA*mU*T*G*T*C*A* | 2286 | XXXXXXXXX | 3-12-5 gapmer | rs7685686 |
| | CCAGAAAAA | | T*C*A*C*C*A*G*mA*mA* | | XXXXXXXXXX | full PS | (A/G) |
| | | | mA*mA*mA | | | | |
| WV-2029 | AATTGTCATCA | 1935 | mA*mA*T*T*G*T*C*A*T* | 2287 | XXXXXXXXX | 2-13-5 gapmer | rs7685686 |
| | CCAGAAAAA | | C*A*C*C*A*G*mA*mA*m | | XXXXXXXXX | full PS | (A/G) |
| | | | A*mA*mA | | | | |
| WV-2030 | AAATTGTCATC | 1936 | mA*mA*mA*T*T*G*T*C* | 2288 | XXXXXXXXX | 3-12-5 gapmer | rs7685686 |
| | ACCAGAAAA | | A*T*C*A*C*C*A*mG*mA* | | XXXXXXXXXX | full PS | (A/G) |
| | | | mA*mA*mA | | | | |
| WV-2031 | AAAUTGTCATC | 1937 | mA*mA*mA*mU*T*G*T*C | 2289 | XXXXXXXXX | 4-11-5 gapmer | rs7685686 |
| | ACCAGAAAA | | *A*T*C*A*C*C*A*mG*mA | | XXXXXXXXXX | full PS | (A/G) |
| | | | *mA*mA*mA | | | | |
| WV-2032 | UAAAUTGTCAT | 1938 | mU*mA*mA*mA*mU*T*G* | 2290 | XXXXXXXXX | 5-11-4 gapmer | rs7685686 |
| | CACCAGAAA | | T*C*A*T*C*A*C*C*A*mG | | XXXXXXXXXX | full PS | (A/G) |
| | | | *mA*mA*mA | | | | |
| WV-2033 | UAAAUTGTCAT | 1939 | mU*mA*mA*mA*mU*T*G* | 2291 | XXXXXXXXX | 5-10-5 gapmer | rs7685686 |
| | CACCAGAAA | | T*C*A*T*C*A*C*C*mA*m | | XXXXXXXXXX | full PS | (A/G) |
| | | | G*mA*mA*mA | | | | |
| WV-2034 | AUAAATTGTCA | 1940 | mA*mU*mA*mA*mA*T*T* | 2292 | XXXXXXXXX | 5-11-4 gapmer | rs7685686 |
| | TCACCAGAA | | G*T*C*A*T*C*A*C*C*mA | | XXXXXXXXXX | full PS | (A/G) |
| | | | *mG*mA*mA | | | | |
| WV-2035 | AUAAATTGTCA | 1941 | mA*mU*mA*mA*mA*T*T* | 2293 | XXXXXXXXX | 5-10-5 gapmer | rs7685686 |
| | TCACCAGAA | | G*T*C*A*T*C*A*C*mC*m | | XXXXXXXXXX | full PS | (A/G) |
| | | | A*mG*mA*mA | | | | |
| WV-2036 | AAUAAATTGTC | 1942 | mA*mA*mU*mA*mA*A*T* | 2294 | XXXXXXXXX | 5-12-3 gapmer | rs7685686 |
| | ATCACCAGA | | T*G*T*C*A*T*C*A*C*C* | | XXXXXXXXXX | full PS | (A/G) |
| | | | mA*mG*mA | | | | |
| WV-2037 | AAUAAATTGTC | 1943 | mA*mA*mU*mA*mA*A*T* | 2295 | XXXXXXXXX | 5-11-4 gapmer | rs7685686 |
| | ATCACCAGA | | T*G*T*C*A*T*C*A*C*mC | | XXXXXXXXXX | full PS | (A/G) |
| | | | *mA*mG*mA | | | | |
| WV-2038 | AAUAAATTGTC | 1944 | mA*mA*mU*mA*mA*A*T* | 2296 | XXXXXXXXX | 5-10-5 gapmer | rs7685686 |
| | ATCACCAGA | | T*G*T*C*A*T*C*A*mC*m | | XXXXXXXXXX | full PS | (A/G) |
| | | | C*mA*mG*mA | | | | |
| WV-2039 | UAAUAAATTGT | 1945 | mU*mA*mA*mU*mA*A*A | 2297 | XXXXXXXXX | 5-13-2 gapmer | rs7685686 |
| | CATCACCAG | | *T*T*G*T*C*A*T*C*A*C* | | XXXXXXXXXX | full PS | (A/G) |
| | | | C*mA*mG | | | | |
| WV-2040 | UAAUAAATTGT | 1946 | mU*mA*mA*mU*mA*A*A | 2298 | XXXXXXXXX | 5-12-3 gapmer | rs7685686 |
| | CATCACCAG | | *T*T*G*T*C*A*T*C*A*C* | | XXXXXXXXXX | full PS | (A/G) |
| | | | mC*mA*mG | | | | |
| WV-2041 | UAAUAAATTGT | 1947 | mU*mA*mA*mU*mA*A*A | 2299 | XXXXXXXXX | 5-11-4 gapmer | rs7685686 |
| | CATCACCAG | | *T*T*G*T*C*A*T*C*A*m | | XXXXXXXXXX | full PS | (A/G) |
| | | | C*mC*mA*mG | | | | |
| WV-2042 | UAAUAAATTGT | 1948 | mU*mA*mA*mU*mA*A*A | 2300 | XXXXXXXXX | 5-10-5 gapmer | rs7685686 |
| | CATCACCAG | | *T*T*G*T*C*A*T*C*mA* | | XXXXXXXXXX | full PS | (A/G) |
| | | | mC*mC*mA*mG | | | | |
| WV-2043 | UUAAUAAATTG | 1949 | mU*mU*mA*mA*mU*A*A | 2301 | XXXXXXXXX | 5-14-1 gapmer | rs7685686 |
| | TCATCACCA | | *A*T*T*G*T*C*A*T*C*A* | | XXXXXXXXXX | full PS | (A/G) |
| | | | C*C*mA | | | | |
| WV-2044 | UUAAUAAATTG | 1950 | mU*mU*mA*mA*mU*A*A | 2302 | XXXXXXXXX | 5-13-2 gapmer | rs7685686 |
| | TCATCACCA | | *A*T*T*G*T*C*A*T*C*A* | | XXXXXXXXXX | full PS | (A/G) |
| | | | C*mC*mA | | | | |
| WV-2045 | UUAAUAAATTG | 1951 | mU*mU*mA*mA*mU*A*A | 2303 | XXXXXXXXX | 5-12-3 gapmer | rs7685686 |
| | TCATCACCA | | *A*T*T*G*T*C*A*T*C*A* | | XXXXXXXXXX | full PS | (A/G) |
| | | | mC*mC*mA | | | | |
| WV-2046 | UUAAUAAATTG | 1952 | mU*mU*mA*mA*mU*A*A | 2304 | XXXXXXXXX | 5-11-4 gapmer | rs7685686 |
| | TCATCACCA | | *A*T*T*G*T*C*A*T*C*m | | XXXXXXXXXX | full PS | (A/G) |
| | | | A*mC*mC*mA | | | | |
| WV-2047 | AUUAATAAATT | 1953 | mA*mU*mU*mA*mA*T*A* | 2305 | XXXXXXXXX | 5-15 hemimer | rs7685686 |
| | GTCATCACC | | A*A*T*T*G*T*C*A*T*C* | | XXXXXXXXXX | full PS | (A/G) |
| | | | A*C*C | | | | |
| WV-2048 | AUUAATAAATT | 1954 | mA*mU*mU*mA*mA*T*A* | 2306 | XXXXXXXXX | 5-14-1 gapmer | rs7685686 |
| | GTCATCACC | | A*A*T*T*G*T*C*A*T*C* | | XXXXXXXXXX | full PS | (A/G) |
| | | | A*C*mC | | | | |
| WV-2049 | AUUAATAAATT | 1955 | mA*mU*mU*mA*mA*T*A* | 2307 | XXXXXXXXX | 5-13-2 gapmer | rs7685686 |
| | GTCATCACC | | A*A*T*T*G*T*C*A*T*C* | | XXXXXXXXXX | full PS | (A/G) |
| | | | A*mC*mC | | | | |
| WV-2050 | AUUAATAAATT | 1956 | mA*mU*mU*mA*mA*T*A* | 2308 | XXXXXXXXX | 5-12-3 gapmer | rs7685686 |
| | GTCATCACC | | A*A*T*T*G*T*C*A*T*C* | | XXXXXXXXXX | full PS | (A/G) |
| | | | mA*mC*mC | | | | |
| WV-2051 | UAUUAATAAAT | 1957 | mU*mA*mU*mU*mA*A*T* | 2309 | XXXXXXXXX | 5-15 hemimer | rs7685686 |
| | TGTCATCAC | | A*A*A*T*T*G*T*C*A*T* | | XXXXXXXXXX | full PS | (A/G) |
| | | | C*A*C | | | | |
| WV-2052 | UAUUAATAAAT | 1958 | mU*mA*mU*mU*mA*A*T* | 2310 | XXXXXXXXX | 5-14-1 gapmer | rs7685686 |
| | TGTCATCAC | | A*A*A*T*T*G*T*C*A*T* | | XXXXXXXXXX | full PS | (A/G) |
| | | | C*A*mC | | | | |
| WV-2053 | UAUUAATAAAT | 1959 | mU*mA*mU*mU*mA*A*T* | 2311 | XXXXXXXXX | 5-13-2 gapmer | rs7685686 |
| | TGTCATCAC | | A*A*A*T*T*G*T*C*A*T* | | XXXXXXXXXX | full PS | (A/G) |
| | | | C*mA*mC | | | | |
| WV-2054 | CUAUUAATAAA | 1960 | mC*mU*mA*mU*mU*A*A | 2312 | XXXXXXXXX | 5-15 hemimer | rs7685686 |
| | TTGTCATCA | | *T*A*A*A*T*T*G*T*C*A* | | XXXXXXXXXX | full PS | (A/G) |
| | | | T*C*A | | | | |
| WV-2055 | CUAUUAATAAA | 1961 | mC*mU*mA*mU*mU*A*A | 2313 | XXXXXXXXX | 5-14-1 gapmer | rs7685686 |
| | TTGTCATCA | | *T*A*A*A*T*T*G*T*C*A* | | XXXXXXXXXX | full PS | (A/G) |
| | | | T*C*mA | | | | |
| WV-2056 | ACUAUTAATAA | 1962 | mA*mC*mU*mA*mU*T*A* | 2314 | XXXXXXXXX | 5-15 hemimer | rs7685686 |
| | ATTGTCATC | | A*T*A*A*A*T*T*G*T*C* | | XXXXXXXXXX | full PS | (A/G) |
| | | | A*T*C | | | | |
| WV-2057 | TGTCATCACCA | 1963 | T*G*T*C*A*T*C*A*C*C* | 2315 | XXXXXXXXX | 15-5 hemimer 1 | rs7685686 |
| | GAAAAAGUC | | A*G*A*A*A*mAmAmGmU | | XXXXXXOOOX | PS on each end | (A/G) |
| | | | *mC | | | and between dN- | |
| | | | | | | mN and dN-dN | |
| WV-2058 | UTGTCATCACC | 1964 | mU*T*G*T*C*A*T*C*A*C | 2316 | XXXXXXXXX | 1-14-5 gapmer 1 | rs7685686 |
| | AGAAAAAGU | | *C*A*G*A*A*mAmAmAm | | XXXXXXOOOX | PS on each end | (A/G) |
| | | | G*mU | | | and between dN- | |
| | | | | | | mN and dN-dN | |
| WV-2059 | TTGTCATCACC | 1965 | T*T*G*T*C*A*T*C*A*C*C | 2317 | XXXXXXXXX | 15-5 hemimer 1 | rs7685686 |
| | AGAAAAAGU | | *A*G*A*A*mAmAmAmG* | | XXXXXXOOOX | PS on each end | (A/G) |
| | | | mU | | | and between dN- | |
| | | | | | | mN and dN-dN | |
| WV-2060 | AUTGTCATCAC | 1966 | mA*mU*T*G*T*C*A*T*C* | 2318 | XXXXXXXXX | 2-13-5 gapmer 1 | rs7685686 |
| | CAGAAAAAG | | A*C*C*A*G*A*mAmAmA | | XXXXXXOOOX | PS on each end | (A/G) |
| | | | mA*mG | | | and between dN- | |
| | | | | | | mN and dN-dN | |
| WV-2061 | ATTGTCATCAC | 1967 | mA*T*T*G*T*C*A*T*C*A | 2319 | XXXXXXXXX | 1-14-5 gapmer 1 | rs7685686 |
| | CAGAAAAAG | | *C*C*A*G*A*mAmAmAm | | XXXXXXOOOX | PS on each end | (A/G) |
| | | | A*mG | | | and between dN- | |
| | | | | | | mN and dN-dN | |
| WV-2062 | AAUTGTCATCA | 1968 | mA*mAmU*T*G*T*C*A*T | 2320 | XOXXXXXXX | 3-12-5 gapmer 1 | rs7685686 |
| | CCAGAAAAA | | *C*A*C*C*A*G*mAmAmA | | XXXXXXOOOX | PS on each end | (A/G) |
| | | | mA*mA | | | and between dN- | |
| | | | | | | mN and dN-dN | |
| WV-2063 | AATTGTCATCA | 1969 | mA*mA*T*T*G*T*C*A*T* | 2321 | XXXXXXXXX | 2-13-5 gapmer 1 | rs7685686 |
| | CCAGAAAAA | | C*A*C*C*A*G*mAmAmA | | XXXXXXOOOX | PS on each end | (A/G) |
| | | | mA*mA | | | and between dN- | |
| | | | | | | mN and dN-dN | |
| WV-2064 | AAATTGTCATC | 1970 | mA*mAmA*T*T*G*T*C*A | 2322 | XOXXXXXXX | 3-12-5 gapmer 1 | rs7685686 |
| | ACCAGAAAA | | *T*C*A*C*C*A*mGmAmA | | XXXXXXOOOX | PS on each end | (A/G) |
| | | | mA*mA | | | and between dN- | |
| | | | | | | mN and dN-dN | |
| WV-2065 | AAAUTGTCATC | 1971 | mA*mAmAmU*T*G*T*C*A | 2323 | XOOXXXXXX | 4-11-5 gapmer 1 | rs7685686 |
| | ACCAGAAAA | | *T*C*A*C*C*A*mGmAmA | | XXXXXXOOOX | PS on each end | (A/G) |
| | | | mA*mA | | | and between dN- | |
| | | | | | | mN and dN-dN | |
| WV-2066 | UAAAUTGTCAT | 1972 | mU*mAmAmAmU*T*G*T* | 2324 | XOOOXXXXX | 5-11-4 gapmer 1 | rs7685686 |
| | CACCAGAAA | | C*A*T*C*A*C*C*A*mGm | | XXXXXXXOOX | PS on each end | (A/G) |
| | | | AmA*mA | | | and between dN- | |
| | | | | | | mN and dN-dN | |
| WV-2067 | UAAAUTGTCAT | 1973 | mU*mAmAmAmU*T*G*T* | 2325 | XOOOXXXXX | 5-10-5 gapmer 1 | rs7685686 |
| | CACCAGAAA | | C*A*T*C*A*C*C*mAmGm | | XXXXXXOOOX | PS on each end | (A/G) |
| | | | AmA*mA | | | and between dN- | |
| | | | | | | mN and dN-dN | |
| WV-2068 | AUAAATTGTCA | 1974 | mA*mUmAmAmA*T*T*G* | 2326 | XOOOXXXXX | 5-11-4 gapmer 1 | rs7685686 |
| | TCACCAGAA | | T*C*A*T*C*A*C*C*mAm | | XXXXXXXOOX | PS on each end | (A/G) |
| | | | GmA*mA | | | and between dN- | |
| | | | | | | mN and dN-dN | |
| WV-2069 | AUAAATTGTCA | 1975 | mA*mUmAmAmA*T*T*G* | 2327 | XOOOXXXXX | 5-10-5 gapmer 1 | rs7685686 |
| | TCACCAGAA | | T*C*A*T*C*A*C*mCmAm | | XXXXXXOOOX | PS on each end | (A/G) |
| | | | GmA*mA | | | and between dN- | |
| | | | | | | mN and dN-dN | |
| WV-2070 | AAUAAATTGTC | 1976 | mA*mAmUmAmA*A*T*T* | 2328 | XOOOXXXXX | 5-12-3 gapmer 1 | rs7685686 |
| | ATCACCAGA | | G*T*C*A*T*C*A*C*C*mA | | XXXXXXXXOX | PS on each end | (A/G) |
| | | | mG*mA | | | and between dN- | |
| | | | | | | mN and dN-dN | |
| WV-2071 | AAUAAATTGTC | 1977 | mA*mAmUmAmA*A*T*T* | 2329 | XOOOXXXXX | 5-11-4 gapmer 1 | rs7685686 |
| | ATCACCAGA | | G*T*C*A*T*C*A*C*mCm | | XXXXXXXOOX | PS on each end | (A/G) |
| | | | AmG*mA | | | and between dN- | |
| | | | | | | mN and dN-dN | |
| WV-2072 | AAUAAATTGTC | 1978 | mA*mAmUmAmA*A*T*T* | 2330 | XOOOXXXXX | 5-10-5 gapmer 1 | rs7685686 |
| | ATCACCAGA | | G*T*C*A*T*C*A*mCmCm | | XXXXXXOOOX | PS on each end | (A/G) |
| | | | AmG*mA | | | and between dN- | |
| | | | | | | mN and dN-dN | |
| WV-2073 | UAAUAAATTGT | 1979 | mU*mAmAmUmA*A*A*T* | 2331 | XOOOXXXXX | 5-13-2 gapmer 1 | rs7685686 |
| | CATCACCAG | | T*G*T*C*A*T*C*A*C*C* | | XXXXXXXXXX | PS on each end | (A/G) |
| | | | mA*mG | | | and between dN- | |
| | | | | | | mN and dN-dN | |
| WV-2074 | UAAUAAATTGT | 1980 | mU*mAmAmUmA*A*A*T* | 2332 | XOOOXXXXX | 5-12-3 gapmer 1 | rs7685686 |
| | CATCACCAG | | T*G*T*C*A*T*C*A*C*mC | | XXXXXXXXOX | PS on each end | (A/G) |
| | | | mA*mG | | | and between dN- | |
| | | | | | | mN and dN-dN | |
| WV-2075 | UAAUAAATTGT | 1981 | mU*mAmAmUmA*A*A*T* | 2333 | XOOOXXXXX | 5-11-4 gapmer 1 | rs7685686 |
| | CATCACCAG | | T*G*T*C*A*T*C*A*mCmC | | XXXXXXXOOX | PS on each end | (A/G) |
| | | | mA*mG | | | and between dN- | |
| | | | | | | mN and dN-dN | |
| WV-2076 | UAAUAAATTGT | 1982 | mU*mAmAmUmA*A*A*T* | 2334 | XOOOXXXXX | 5-10-5 gapmer 1 | rs7685686 |
| | CATCACCAG | | T*G*T*C*A*T*C*mAmCm | | XXXXXXOOOX | PS on each end | (A/G) |
| | | | CmA*mG | | | and between dN- | |
| | | | | | | mN and dN-dN | |
| WV-2077 | UUAAUAAATTG | 1983 | mU*mUmAmAmU*A*A*A* | 2335 | XOOOXXXXX | 5-14-1 gapmer 1 | rs7685686 |
| | TCATCACCA | | T*T*G*T*C*A*T*C*A*C*C | | XXXXXXXXXX | PS on each end | (A/G) |
| | | | *mA | | | and between dN- | |
| | | | | | | mN and dN-dN | |
| WV-2078 | UUAAUAAATTG | 1984 | mU*mUmAmAmU*A*A*A* | 2336 | XOOOXXXXX | 5-13-2 gapmer 1 | rs7685686 |
| | TCATCACCA | | T*T*G*T*C*A*T*C*A*C* | | XXXXXXXXXX | PS on each end | (A/G) |
| | | | mC*mA | | | and between dN- | |
| | | | | | | mN and dN-dN | |
| WV-2079 | UUAAUAAATTG | 1985 | mU*mUmAmAmU*A*A*A* | 2337 | XOOOXXXXX | 5-12-3 gapmer 1 | rs7685686 |
| | TCATCACCA | | T*T*G*T*C*A*T*C*A*mC | | XXXXXXXXOX | PS on each end | (A/G) |
| | | | mC*mA | | | and between dN- | |
| | | | | | | mN and dN-dN | |
| WV-2080 | UUAAUAAATTG | 1986 | mU*mUmAmAmU*A*A*A* | 2338 | XOOOXXXXX | 5-11-4 gapmer 1 | rs7685686 |
| | TCATCACCA | | T*T*G*T*C*A*T*C*mAmC | | XXXXXXXOOX | PS on each end | (A/G) |
| | | | mC*mA | | | and between dN- | |
| | | | | | | mN and dN-dN | |
| WV-2081 | AUUAATAAATT | 1987 | mA*mUmUmAmA*T*A*A* | 2339 | XOOOXXXXX | 5-15 hemimer 1 | rs7685686 |
| | GTCATCACC | | A*T*T*G*T*C*A*T*C*A*C | | XXXXXXXXXX | PS on each end | (A/G) |
| | | | *C | | | and between dN- | |
| | | | | | | mN and dN-dN | |
| WV-2082 | AUUAATAAATT | 1988 | mA*mUmUmAmA*T*A*A* | 2340 | XOOOXXXXX | 5-14-1 gapmer 1 | rs7685686 |
| | GTCATCACC | | A*T*T*G*T*C*A*T*C*A*C | | XXXXXXXXXX | PS on each end | (A/G) |
| | | | *mC | | | and between dN- | |
| | | | | | | mN and dN-dN | |
| WV-2083 | AUUAATAAATT | 1989 | mA*mUmUmAmA*T*A*A* | 2341 | XOOOXXXXX | 5-13-2 gapmer 1 | rs7685686 |
| | GTCATCACC | | A*T*T*G*T*C*A*T*C*A* | | XXXXXXXXXX | PS on each end | (A/G) |
| | | | mC*mC | | | and between dN- | |
| | | | | | | mN and dN-dN | |
| WV-2084 | AUUAATAAATT | 1990 | mA*mUmUmAmA*T*A*A* | 2342 | XOOOXXXXX | 5-12-3 gapmer 1 | rs7685686 |
| | GTCATCACC | | A*T*T*G*T*C*A*T*C*mA | | XXXXXXXXOX | PS on each end | (A/G) |
| | | | mC*mC | | | and between dN- | |
| | | | | | | mN and dN-dN | |
| WV-2085 | UAUUAATAAAT | 1991 | mU*mAmUmUmA*A*T*A* | 2343 | XOOOXXXXX | 5-15 hemimer 1 | rs7685686 |
| | TGTCATCAC | | A*A*T*T*G*T*C*A*T*C* | | XXXXXXXXXX | PS on each end | (A/G) |
| | | | A*C | | | and between dN- | |
| | | | | | | mN and dN-dN | |
| WV-2086 | UAUUAATAAAT | 1992 | mU*mAmUmUmA*A*T*A* | 2344 | XOOOXXXXX | 5-14-1 gapmer 1 | rs7685686 |
| | TGTCATCAC | | A*A*T*T*G*T*C*A*T*C* | | XXXXXXXXXX | PS on each end | (A/G) |
| | | | A*mC | | | and between dN- | |
| | | | | | | mN and dN-dN | |
| WV-2087 | UAUUAATAAAT | 1993 | mU*mAmUmUmA*A*T*A* | 2345 | XOOOXXXXX | 5-13-2 gapmer 1 | rs7685686 |
| | TGTCATCAC | | A*A*T*T*G*T*C*A*T*C* | | XXXXXXXXXX | PS on each end | (A/G) |
| | | | mA*mC | | | and between dN- | |
| | | | | | | mN and dN-dN | |
| WV-2088 | CUAUUAATAAA | 1994 | mC*mUmAmUmU*A*A*T* | 2346 | XOOOXXXXX | 5-15 hemimer 1 | rs7685686 |
| | TTGTCATCA | | A*A*A*T*T*G*T*C*A*T* | | XXXXXXXXXX | PS on each end | (A/G) |
| | | | C*A | | | and between dN- | |
| | | | | | | mN and dN-dN | |
| WV-2089 | CUAUUAATAAA | 1995 | mC*mUmAmUmU*A*A*T* | 2347 | XOOOXXXXX | 5-14-1 gapmer 1 | rs7685686 |
| | TTGTCATCA | | A*A*A*T*T*G*T*C*A*T* | | XXXXXXXXXX | PS on each end | (A/G) |
| | | | C*mA | | | and between dN- | |
| | | | | | | mN and dN-dN | |
| WV-2090 | ACUAUTAATAA | 1996 | mA*mCmUmAmU*T*A*A* | 2348 | XOOOXXXXX | 5-15 hemimer 1 | rs7685686 |
| | ATTGTCATC | | T*A*A*A*T*T*G*T*C*A*T | | XXXXXXXXXX | PS on each end | (A/G) |
| | | | *C | | | and between dN- | |
| | | | | | | mN and dN-dN | |
| WV-2163 | GACUUUUUCU | 1997 | rGrArCrUrUrUrUrUrCrUrGr | 2349 | OOOOOOOOO | HTT rs7685686 | HTT rs7685686 |
| | GGUGAUGGCA | | GrUrGrArUrGrGrCrArArUrU | | OOOOOOOOO | | |
| | AUUUAUUAAU | | rUrArUrUrArArUrArG | | OOOOOOOOO | | |
| | AG | | | | OOOO | | |
| WV-2164 | GACUUUUUCU | 1998 | rGrArCrUrUrUrUrUrCrUrGr | 2350 | OOOOOOOOO | HTT rs7685686 | HTT rs7685686 |
| | GGUGAUGACA | | GrUrGrArUrGrArCrArArUrU | | OOOOOOOOO | | |
| | AUUUAUUAAU | | rUrArUrUrArArUrArG | | OOOOOOOOO | | |
| | AG | | | | OOOO | | |
| WV-2269 | UAAAUTGTCAT | 1999 | mU*SmAmAmAmU*ST*SG | 2351 | SOOOSSSSSRS | 5-10-5 2′ OMe- | HTT rs7685686 |
| | CACCAGAAA | | *ST*SC*SA*RT*SC*SA*SC | | SSSSOOOS | DNA-2′-OMe | |
| | | | *SC*SmAmGmAmA*SmA | | | Gapmer 1-3-11- | |
| | | | | | | 3-1 (PS/PO) | |
| WV-2270 | AUAAATTGTCA | 2000 | mA*SmUmAmAmA*ST*ST | 2352 | SOOOSSSSSSR | 5-10-5 2′ OMe- | HTT rs7685686 |
| | TCACCAGAA | | *SG*ST*SC*SA*RT*SC*SA | | SSSSOOOS | DNA-2′-OMe | |
| | | | *SC*SmCmAmGmA*SmA | | | Gapmer 1-3-11- | |
| | | | | | | 3-1 (PS/PO) | |
| WV-2271 | AAUAAATTGTC | 2001 | mA*SmAmUmAmA*SA*ST | 2353 | SOOOSSSSSSS | 5-10-5 2′ OMe- | HTT rs7685686 |
| | ATCACCAGA | | *ST*SG*ST*SC*SA*RT*SC | | RSSSOOOS | DNA-2′-OMe | |
| | | | *SA*SmCmCmAmG*SmA | | | Gapmer 1-3-11- | |
| | | | | | | 3-1 (PS/PO) | |
| WV-2272 | UAAUAAATTGT | 2002 | mU*SmAmAmUmA*SA*SA | 2354 | SOOOSSSSSSS | 5-10-5 2′ OMe- | HTT rs7685686 |
| | CATCACCAG | | *ST*ST*SG*ST*SC*SA*RT | | SRSSOOOS | DNA-2′-OMe | |
| | | | *SC*SmAmCmCmA*SmG | | | Gapmer 1-3-11- | |
| | | | | | | 3-1 (PS/PO) | |
| WV-2374 | AAUAAATTGTC | 2003 | mA*SmAmUmAmA*SA*ST | 2355 | SOOOSSSSSSS | P10 stereopure | HTT rs7685686 |
| | ATCACCAGA | | *ST*SG*ST*SC*SA*RT*SC | | RSSSSOOS | analogue of WV- | |
| | | | *SA*SC*SmCmAmG*SmA | | | 2071 5-11-4 2′- | |
| | | | | | | OMe-DNA-2′- | |
| | | | | | | OMe Gapmer 1- | |
| | | | | | | 3-12-2-1 | |
| | | | | | | (PS/PO) | |
| WV-2375 | UAAUAAATTGT | 2004 | mU*SmAmAmUmA*SA*SA | 2356 | SOOOSSSSSSS | P11 stereopure | HTT rs7685686 |
| | CATCACCAG | | *ST*ST*SG*ST*SC*SA*RT | | SRSSSOOS | analogue of WV- | |
| | | | *SC*SA*SmCmCmA*SmG | | | 20755-11-4 2′- | |
| | | | | | | OMe-DNA-2′- | |
| | | | | | | OMe Gapmer 1- | |
| | | | | | | 3-12-2-1 | |
| | | | | | | (PS/PO) | |
| WV-2377 | GCACAAGGGCA | 2005 | mG*mCmAmCmA*A*G*G* | 2357 | XOOOXXXXX | P11 | HTT rs362307 |
| | CAGACUUCC | | G*C*A*C*A*G*A*mCmUm | | XXXXXXOOOX | stereorandom | |
| | | | UmC*mC | | | analogue of WV- | |
| | | | | | | 932 5-10-5 2′- | |
| | | | | | | OMe-DNA-2′- | |
| | | | | | | OMe Gapmer | |
| | | | | | | and 1-3-11-3-1 | |
| | | | | | | (PS/PO) | |
| WV-2378 | GCACAAGGGCA | 2006 | mG*SmCmAmCmA*SA*SG | 2358 | SOOOSSSSSSS | P11 | HTT rs362307 |
| | CAGACUUCC | | *SG*SG*SC*SA*SC*RA*S | | RSSSOOOS | stereorandom | |
| | | | G*SA*SmCmUmUmC*SmC | | | analogue of WV- | |
| | | | | | | 932 5-10-5 2′- | |
| | | | | | | OMe-DNA-2′- | |
| | | | | | | OMe Gapmer | |
| | | | | | | and 1-3-11-3-1 | |
| | | | | | | (PS/PO) | |
| WV-2379 | CACAAGGGCAC | 2007 | mC*mAmCmAmA*G*G*G* | 2359 | XOOOXXXXX | P10 | HTT rs362307 |
| | AGACUUCCA | | C*A*C*A*G*A*C*mUmUm | | XXXXXXOOOX | sereorandom | |
| | | | CmC*mA | | | analogue of WV- | |
| | | | | | | 933 5-10-5 2′- | |
| | | | | | | OMe-DNA-2′- | |
| | | | | | | OMe Gapmer | |
| | | | | | | and 1-3-11-3-1 | |
| | | | | | | (PS/PO) | |
| WV-2380 | CACAAGGGCAC | 2008 | mC*SmAmCmAmA*SG*SG | 2360 | SOOOSSSSSSR | P10 stereopure | HTT rs362307 |
| | AGACUUCCA | | *SG*SC*SA*SC*RA*SG*S | | SSSSOOOS | analogue of WV- | |
| | | | A*SC*SmUmUmCmC*SmA | | | 933 5-10-5 2′- | |
| | | | | | | OMe-DNA-2′- | |
| | | | | | | OMe Gapmer | |
| | | | | | | and 1-3-11-3-1 | |
| | | | | | | (PS/PO) | |
| WV-2416 | UAAAUTGTCAT | 2009 | mU*SmAmAmAmU*ST*SG | 2361 | SOOOSSSSRSS | P8 5-10-5 2′ | HTT rs7685686 |
| | CACCAGAAA | | *ST*SC*RA*ST*SC*SA*SC | | SSSSOOOS | OMe-DNA-2′- | |
| | | | *SC*SmAmGmAmA*SmA | | | OMe Gapmer 1- | |
| | | | | | | 3-11-3-1 | |
| | | | | | | (PS/PO) | |
| WV-2417 | AUAAATTGTCA | 2010 | mA*SmUmAmAmA*ST*ST | 2362 | SOOOSSSSSRS | P9 5-10-5 2′ | HTT rs7685686 |
| | TCACCAGAA | | *SG*ST*SC*RA*ST*SC*SA | | SSSSOOOS | OMe-DNA-2′- | |
| | | | *SC*SmCmAmGmA*SmA | | | OMe Gapmer 1- | |
| | | | | | | 3-11-3-1 | |
| | | | | | | (PS/PO) | |
| WV-2418 | AAUAAATTGTC | 2011 | mA*SmAmUmAmA*SA*ST | 2363 | SOOOSSSSSSR | P10 5-10-5 2′ | HTT rs7685686 |
| | ATCACCAGA | | *ST*SG*ST*SC*RA*ST*SC | | SSSSOOOS | OMe-DNA-2′- | |
| | | | *SA*SmCmCmAmG*SmA | | | OMe Gapmer 1- | |
| | | | | | | 3-11-3-1 | |
| | | | | | | (PS/PO) | |
| WV-2419 | UAAUAAATTGT | 2012 | mU*SmAmAmUmA*SA*SA | 2364 | SOOOSSSSSSS | P11 5-10-5 2′ | HTT rs7685686 |
| | CATCACCAG | | *ST*ST*SG*ST*SC*RA*ST | | RSSSOOOS | OMe-DNA-2′- | |
| | | | *SC*SmAmCmCmA*SmG | | | OMe Gapmer 1- | |
| | | | | | | 3-11-3-1 | |
| | | | | | | (PS/PO) | |
| WV-2589 | UCCCCACAGAG | 2013 | mU*SmCmCmCmC*SA*SC | 2365 | SOOOSSRSSSS | P6 5-10-5 (2′- | HTT rs2530595 |
| | GGAGGAAGC | | *RA*SG*SA*SG*SG*SG*S | | SSSSOOOS | OMe-DNA-2′- | (C/T) |
| | | | A*SG*SmGmAmAmG*SmC | | | OMe) 1-3-11-3- | |
| | | | | | | 1 (PS/PO) | |
| | | | | | | Gapmer | |
| WV-2590 | CUCCCCACAGA | 2014 | mC*SmUmCmCmC*SC*SA | 2366 | SOOOSSSRSSS | P7 5-10-5 (2′- | HTT |
| | GGGAGGAAG | | *SC*RA*SG*SA*SG*SG*S | | SSSSOOOS | OMe-DNA-2′- | rs2530595 |
| | | | G*SA*SmGmGmAmA*SmG | | | OMe) 1-3-11-3- | (C/T) |
| | | | | | | 1 (PS/PO) | |
| | | | | | | Gapmer | |
| WV-2591 | CCUCCCCACAG | 2015 | mC*SmCmUmCmC*SC*SC* | 2367 | SOOOSSSSRSS | P8 5-10-5 (2′- | HTT |
| | AGGGAGGAA | | SA*SC*RA*SG*SA*SG*SG | | SSSSOOOS | OMe-DNA-2′- | rs2530595 |
| | | | *SG*SmAmGmGmA*SmA | | | OMe) 1-3-11-3- | (C/T) |
| | | | | | | 1 (PS/PO) | |
| | | | | | | Gapmer | |
| WV-2592 | UCCUCCCCACA | 2016 | mU*SmCmCmUmC*SC*SC | 2368 | SOOOSSSSSRS | P9 5-10-5 (2′- | HTT |
| | GAGGGAGGA | | *SC*SA*SC*RA*SG*SA*S | | SSSSOOOS | OMe-DNA-2′- | rs2530595 |
| | | | G*SG*SmGmAmGmG*SmA | | | OMe) 1-3-11-3- | (C/T) |
| | | | | | | 1 (PS/PO) | |
| | | | | | | Gapmer | |
| WV-2593 | GUCCUCCCCAC | 2017 | mG*SmUmCmCmU*SC*SC | 2369 | SOOOSSSSSSR | P10 5-10-5 (2′- | HTT |
| | AGAGGGAGG | | *SC*SC*SA*SC*RA*SG*S | | SSSSOOOS | OMe-DNA-2′- | rs2530595 |
| | | | A*SG*SmGmGmAmG*SmG | | | OMe) 1-3-11-3- | (C/T) |
| | | | | | | 1 (PS/PO) | |
| | | | | | | Gapmer | |
| WV-2594 | GGUCCTCCCCA | 2018 | mG*SmGmUmCmC*ST*SC | 2370 | SOOOSSSSSSS | P11 5-10-5 (2′- | HTT |
| | CAGAGGGAG | | *SC*SC*SC*SA*SC*RA*S | | RSSSOOOS | OMe-DNA-2′- | rs2530595 |
| | | | G*SA*SmGmGmGmA*SmG | | | OMe) 1-3-11-3- | (C/T) |
| | | | | | | 1 (PS/PO) | |
| | | | | | | Gapmer | |
| WV-2595 | GGGUCCTCCCC | 2019 | mG*SmGmGmUmC*SC*ST | 2371 | SOOOSSSSSSS | P12 5-10-5 (2′- | HTT |
| | ACAGAGGGA | | *SC*SC*SC*SC*SA*SC*RA | | SRSSOOOS | OMe-DNA-2′- | rs2530595 |
| | | | *SG*SmAmGmGmG*SmA | | | OMe) 1-3-11-3- | (C/T) |
| | | | | | | 1 (PS/PO) | |
| | | | | | | Gapmer | |
| WV-2596 | CGGGUCCTCCC | 2020 | mC*SmGmGmGmU*SC*SC | 2372 | SOOOSSSSSSS | P13 5-10-5 (2′- | HTT |
| | CACAGAGGG | | *ST*SC*SC*SC*SC*SA*SC | | SSRSOOOS | OMe-DNA-2′- | rs2530595 |
| | | | *RA*SmGmAmGmG*SmG | | | OMe) 1-3-11-3- | (C/T) |
| | | | | | | 1 (PS/PO) | |
| | | | | | | Gapmer | |
| WV-2597 | ACAGUAGATGA | 2021 | mA*SmCmAmGmU*SA*SG | 2373 | SOOOSSRSSSS | P6 5-10-5 (2′- | HTT |
| | GGGAGCAGG | | *RA*ST*SG*SA*SG*SG*S | | SSSSOOOS | OMe-DNA-2′- | (rs362331) |
| | | | G*SA*SmGmCmAmG*SmG | | | OMe) 1-3-11-3- | (C/T) |
| | | | | | | 1 (PS/PO) | |
| | | | | | | Gapmer | |
| WV-2598 | CACAGTAGATG | 2022 | mC*SmAmCmAmG*ST*SA | 2374 | SOOOSSSRSSS | P7 5-10-5 (2′- | HTT |
| | AGGGAGCAG | | *SG*RA*ST*SG*SA*SG*S | | SSSSOOOS | OMe-DNA-2′- | (rs362331) |
| | | | G*SG*SmAmGmCmA*SmG | | | OMe) 1-3-11-3- | (C/T) |
| | | | | | | 1 (PS/PO) | |
| | | | | | | Gapmer | |
| WV-2599 | ACACAGTAGAT | 2023 | mA*SmCmAmCmA*SG*ST | 2375 | SOOOSSSSRSS | P8 5-10-5 (2′- | HTT |
| | GAGGGAGCA | | *SA*SG*RA*ST*SG*SA*S | | SSSSOOOS | OMe-DNA-2′- | (rs362331) |
| | | | G*SG*SmGmAmGmC*SmA | | | OMe) 1-3-11-3- | (C/T) |
| | | | | | | 1 (PS/PO) | |
| | | | | | | Gapmer | |
| WV-2600 | CACACAGTAGA | 2024 | mC*SmAmCmAmC*SA*SG | 2376 | SOOOSSSSSRS | P9 5-10-5 (2′- | HTT |
| | TGAGGGAGC | | *ST*SA*SG*RA*ST*SG*S | | SSSSOOOS | OMe-DNA-2′- | (rs362331) |
| | | | A*SG*SmGmGmAmG*SmC | | | OMe) 1-3-11-3- | (C/T) |
| | | | | | | 1 (PS/PO) | |
| | | | | | | Gapmer | |
| WV-2601 | GCACACAGTAG | 2025 | mG*SmCmAmCmA*SC*SA | 2377 | SOOOSSSSSSR | P10 5-10-5 (2′- | HTT |
| | ATGAGGGAG | | *SG*ST*SA*SG*RA*ST*S | | SSSSOOOS | OMe-DNA-2′- | (rs362331) |
| | | | G*SA*SmGmGmGmA*SmG | | | OMe) 1-3-11-3- | (C/T) |
| | | | | | | 1 (PS/PO) | |
| | | | | | | Gapmer | |
| WV-2602 | UGCACACAGTA | 2026 | mU*SmGmCmAmC*SA*SC | 2378 | SOOOSSSSSSS | P11 5-10-5 (2′- | HTT |
| | GATGAGGGA | | *SA*SG*ST*SA*SG*RA*S | | RSSSOOOS | OMe-DNA-2′- | (rs362331) |
| | | | T*SG*SmAmGmGmG*SmA | | | OMe) 1-3-11-3- | (C/T) |
| | | | | | | 1 (PS/PO) | |
| | | | | | | Gapmer | |
| WV-2603 | GUGCACACAGT | 2027 | mG*SmUmGmCmA*SC*SA | 2379 | SOOOSSSSSSS | P12 5-10-5 (2′- | HTT |
| | AGATGAGGG | | *SC*SA*SG*ST*SA*SG*R | | SRSSOOOS | OMe-DNA-2′- | (rs362331) |
| | | | A*ST*SmGmAmGmG*SmG | | | OMe) 1-3-11-3- | (C/T) |
| | | | | | | 1 (PS/PO) | |
| | | | | | | Gapmer | |
| WV-2604 | AGUGCACACAG | 2028 | mA*SmGmUmGmC*SA*SC | 2380 | SOOOSSSSSSS | P13 5-10-5 (2′- | HTT |
| | TAGAUGAGG | | *SA*SC*SA*SG*ST*SA*SG | | SSRSOOOS | OMe-DNA-2′- | (rs362331) |
| | | | *RA*SmUmGmAmG*SmG | | | OMe) 1-3-11-3- | (C/T) |
| | | | | | | 1 (PS/PO) | |
| | | | | | | Gapmer | |
| WV-2605 | UCCCCACAGAG | 2029 | mU*mCmCmCmC*A*C*A* | 2381 | XOOOXXXXX | P6 5-10-5 (2′- | HTT r2530595 |
| | GGAGGAAGC | | G*A*G*G*G*A*G*mGmAm | | XXXXXXOOOX | OMe-DNA-2′- | (C/T) |
| | | | AmG*mC | | | OMe) 1-3-11-3- | |
| | | | | | | 1 (P/PO) Gapmer | |
| WV-2606 | CUCCCCACAGA | 2030 | mC*mUmCmCmC*C*A*C* | 2382 | XOOOXXXXX | P7 5-10-5 (2′- | HTT r2530595 |
| | GGGAGGAAG | | A*G*A*G*G*G*A*mGmGm | | XXXXXXOOOX | OMe-DNA-2′- | (C/T) |
| | | | AmA*mG | | | OMe) 1-3-11-3- | |
| | | | | | | 1 (P/PO) Gapmer | |
| WV-2607 | CCUCCCCACAG | 2031 | mC*mCmUmCmC*C*C*A* | 2383 | XOOOXXXXX | P8 5-10-5 (2′- | HTT r2530595 |
| | AGGGAGGAA | | C*A*G*A*G*G*G*mAmGm | | XXXXXXOOOX | OMe-DNA-2′- | (C/T) |
| | | | GmA*mA | | | OMe) 1-3-11-3- | |
| | | | | | | 1 (P/PO) Gapmer | |
| WV-2608 | UCCUCCCCACA | 2032 | mU*mCmCmUmC*C*C*C* | 2384 | XOOOXXXXX | P9 5-10-5 (2′- | HTT r2530595 |
| | GAGGGAGGA | | A*C*A*G*A*G*G*mGmAm | | XXXXXXOOOX | OMe-DNA-2′- | (C/T) |
| | | | GmG*mA | | | OMe) 1-3-11-3- | |
| | | | | | | 1 (P/PO) Gapmer | |
| WV-2609 | GUCCUCCCCAC | 2033 | mG*mUmCmCmU*C*C*C* | 2385 | XOOOXXXXX | P10 5-10-5 (2′- | HTT r2530595 |
| | AGAGGGAGG | | C*A*C*A*G*A*G*mGmGm | | XXXXXXOOOX | OMe-DNA-2′- | (C/T) |
| | | | AmG*mG | | | OMe) 1-3-11-3- | |
| | | | | | | 1 (P/PO) Gapmer | |
| WV-2610 | GGUCCTCCCCA | 2034 | mG*mGmUmCmC*T*C*C* | 2386 | XOOOXXXXX | P11 5-10-5 (2′- | HTT r2530595 |
| | CAGAGGGAG | | C*C*A*C*A*G*A*mGmGm | | XXXXXXOOOX | OMe-DNA-2′- | (C/T) |
| | | | GmA*mG | | | OMe) 1-3-11-3- | |
| | | | | | | 1 (P/PO) Gapmer | |
| WV-2611 | GGGUCCTCCCC | 2035 | mG*mGmGmUmC*C*T*C* | 2387 | XOOOXXXXX | P12 5-10-5 (2′- | HTT r2530595 |
| | ACAGAGGGA | | C*C*C*A*C*A*G*mAmGm | | XXXXXXOOOX | OMe-DNA-2′- | (C/T) |
| | | | GmG*mA | | | OMe) 1-3-11-3- | |
| | | | | | | 1 (P/PO) Gapmer | |
| WV-2612 | CGGGUCCTCCC | 2036 | mC*mGmGmGmU*C*C*T* | 2388 | XOOOXXXXX | P13 5-10-5 (2′- | HTT r2530595 |
| | CACAGAGGG | | C*C*C*C*A*C*A*mGmAm | | XXXXXXOOOX | OMe-DNA-2′- | (C/T) |
| | | | GmG*mG | | | OMe) 1-3-11-3- | |
| | | | | | | 1 (P/PO) Gapmer | |
| WV-2613 | ACAGUAGATGA | 2037 | mA*mCmAmGmU*A*G*A* | 2389 | XOOOXXXXX | P6 5-10-5 (2′- | HTT (r362331) |
| | GGGAGCAGG | | T*G*A*G*G*G*A*mGmCm | | XXXXXXOOOX | OMe-DNA-2′- | (C/T) |
| | | | AmG*mG | | | OMe) 1-3-11-3- | |
| | | | | | | 1 (P/PO) Gapmer | |
| WV-2614 | CACAGTAGATG | 2038 | mC*mAmCmAmG*T*A*G* | 2390 | XOOOXXXXX | P7 5-10-5 (2′- | HTT (r362331) |
| | AGGGAGCAG | | A*T*G*A*G*G*G*mAmGm | | XXXXXXOOOX | OMe-DNA-2′- | (C/T) |
| | | | CmA*mG | | | OMe) 1-3-11-3- | |
| | | | | | | 1 (P/PO) Gapmer | |
| WV-2615 | ACACAGTAGAT | 2039 | mA*mCmAmCmA*G*T*A* | 2391 | XOOOXXXXX | P8 5-10-5 (2′- | HTT (r362331) |
| | GAGGGAGCA | | G*A*T*G*A*G*G*mGmAm | | XXXXXXOOOX | OMe-DNA-2′- | (C/T) |
| | | | GmC*mA | | | OMe) 1-3-11-3- | |
| | | | | | | 1 (P/PO) Gapmer | |
| WV-2616 | CACACAGTAGA | 2040 | mC*mAmCmAmC*A*G*T* | 2392 | XOOOXXXXX | P9 5-10-5 (2′- | HTT (r362331) |
| | TGAGGGAGC | | A*G*A*T*G*A*G*mGmGm | | XXXXXXOOOX | OMe-DNA-2′- | (C/T) |
| | | | AmG*mC | | | OMe) 1-3-11-3- | |
| | | | | | | 1 (P/PO) Gapmer | |
| WV-2617 | GCACACAGTAG | 2041 | mG*mCmAmCmA*C*A*G* | 2393 | XOOOXXXXX | P10 5-10-5 (2′- | HTT (r362331) |
| | ATGAGGGAG | | T*A*G*A*T*G*A*mGmGm | | XXXXXXOOOX | OMe-DNA-2′- | (C/T) |
| | | | GmA*mG | | | OMe) 1-3-11-3- | |
| | | | | | | 1 (P/PO) Gapmer | |
| WV-2618 | UGCACACAGTA | 2042 | mU*mGmCmAmC*A*C*A* | 2394 | XOOOXXXXX | P11 5-10-5 (2′- | HTT (r362331) |
| | GATGAGGGA | | G*T*A*G*A*T*G*mAmGm | | XXXXXXOOOX | OMe-DNA-2′- | (C/T) |
| | | | GmG*mA | | | OMe) 1-3-11-3- | |
| | | | | | | 1 (P/PO) Gapmer | |
| WV-2619 | GUGCACACAGT | 2043 | mG*mUmGmCmA*C*A*C* | 2395 | X000XXXXX | P12 5-10-5 (2′- | HTT (r362331) |
| | AGATGAGGG | | A*G*T*A*G*A*T*mGmAm | | XXXXXXOOOX | OMe-DNA-2′- | (C/T) |
| | | | GmG*mG | | | OMe) 1-3-11-3- | |
| | | | | | | 1 (P/PO) Gapmer | |
| WV-2620 | AGUGCACACAG | 2044 | mA*mGmUmGmC*A*C*A* | 2396 | XOOOXXXXX | P13 5-10-5 (2′- | HTT (r362331) |
| | TAGAUGAGG | | C*A*G*T*A*G*A*mUmGm | | XXXXXXOOOX | OMe-DNA-2′- | (C/T) |
| | | | AmG*mG | | | OMe) 1-3-11-3- | |
| | | | | | | 1 (P/PO) Gapmer | |
| WV-2623 | GGCACAAGGGC | 2045 | GGCACAAGGGCACAGAC | 2397 | OOOOOOOOO | DNA version of | HTT rs362307 |
| | ACAGACTTC | | TTC | | OOOOOOOOOO | WV-1092 | (C/T) |
| WV-2659 | GGCACAAGGGC | 2046 | mG*SmGmCmAmC*SA*SA | 2398 | SOOOSSSSSSS | WV-1092 | rs362307 |
| | ACAGACUUC | | *SG*SG*SG*SC*SA*SC*S | | SSSSOOOS | analogue with | Human HTT |
| | | | A*SG*SmAmCmUmU*SmC | | | All Sp | |
| | | | | | | stereochemistry | |
| WV-2671 | GGGUCCTCCCC | 2047 | mG*SmG*SmGmUmC*SC* | 2399 | SSOOSSSSSSSS | P12 5-10-5 (2′- | HTT |
| | ACAGAGGGA | | ST*SC*SC*SC*SC*SA*SC* | | RSSOOSS | OMe-DNA-2′- | rs2530595 |
| | | | RA*SG*SmAmGmG*SmG* | | | OMe) 2-2-11-2- | (C/T) |
| | | | SmA | | | 2 (PS/PO) | |
| | | | | | | Gapmer with Sp | |
| | | | | | | wings | |
| WV-2672 | GGGUCCTCCCC | 2048 | mG*RmG*RmGmUmC*SC* | 2400 | RROOSSSSSSS | P12 5-10-5 (2′- | HTT |
| | ACAGAGGGA | | ST*SC*SC*SC*SC*SA*SC* | | SRSSOORR | OMe-DNA-2′- | rs2530595 |
| | | | RA*SG*SmAmGmG*RmG* | | | OMe) 4-11-4 | (C/T) |
| | | | RmA | | | (PS/PO) Gapmer | |
| | | | | | | with Rp wings | |
| WV-2673 | GGGUCCTCCCC | 2049 | mG*SmG*SmG*SmU*SmC* | 2401 | SSSSSSSSSSSS | P12 5-10-5 (2′- | HTT |
| | ACAGAGGGA | | SC*ST*SC*SC*SC*SC*SA* | | RSSSSSS | OMe-DNA-2′- | rs2530595 |
| | | | SC*RA*SG*SmA*SmG*Sm | | | OMe) 2-2-11-2- | (C/T) |
| | | | G*SmG*SmA | | | 2 (PS/PO) | |
| | | | | | | Gapmer with Sp | |
| | | | | | | wings | |
| WV-2674 | GGGUCCTCCCC | 2050 | mG*RmG*RmG*RmU*RmC | 2402 | RRRRSSSSSSS | P12 5-10-5 (2′- | HTT |
| | ACAGAGGGA | | *SC*ST*SC*SC*SC*SC*SA | | SRSSRRRR | OMe-DNA-2′- | rs2530595 |
| | | | *SC*RA*SG*SmA*RmG*R | | | OMe) 2-2-11-2- | (C/T) |
| | | | mG*RmG*RmA | | | 2 (PS/PO) | |
| | | | | | | Gapmer with Rp | |
| | | | | | | wings | |
| WV-2675 | GGGUUCTCCCC | 2051 | mG*SmGmGmUmU*SC*ST | 2403 | SOOOSSSSSSS | P12 analogue of | HTT |
| | ACAGAGGGA | | *SC*SC*SC*SC*SA*SC*RA | | SRSSOOOS | WV-2595 with | rs2530595 |
| | | | *SG*SmAmGmGmG*SmA | | | G:U mismatch at | (C/T) |
| | | | | | | position 5 | |
| WV-2676 | GGCACAAGGGC | 2052 | mG*RmGmCmAmC*SA*SA | 2404 | ROOOSSSSSSS | WV-1092 | rs362307 |
| | ACAGACUUC | | *SG*SG*SG*SC*SA*SC*S | | SSSSOOOS | analogue for | Human HTT |
| | | | A*SG*SmAmCmUmU*SmC | | | CMC | |
| WV-2682 | GGCACAAGGGC | 2053 | mG*SmGmCmAmC*RA*SA | 2405 | SOOORSSSSSS | WV-1092 | rs362307 |
| | ACAGACUUC | | *SG*SG*SG*SC*SA*SC*S | | SSSSOOOS | analogue for | Human HTT |
| | | | A*SG*SmAmCmUmU*SmC | | | CMC | |
| WV-2683 | GGCACAAGGGC | 2054 | mG*SmGmCmAmC*SA*RA | 2406 | SOOOSRSSSSS | WV-1092 | rs362307 |
| | ACAGACUUC | | *SG*SG*SG*SC*SA*SC*S | | SSSSOOOS | analogue for | Human HTT |
| | | | A*SG*SmAmCmUmU*SmC | | | CMC | |
| WV-2684 | GGCACAAGGGC | 2055 | mG*SmGmCmAmC*SA*SA | 2407 | SOOOSSRSSSS | WV-1092 | rs362307 |
| | ACAGACUUC | | *RG*SG*SG*SC*SA*SC*S | | SSSSOOOS | analogue for | Human HTT |
| | | | A*SG*SmAmCmUmU*SmC | | | CMC | |
| WV-2685 | GGCACAAGGGC | 2056 | mG*SmGmCmAmC*SA*SA | 2408 | SOOOSSSRSSS | WV-1092 | rs362307 |
| | ACAGACUUC | | *SG*RG*SG*SC*SA*SC*S | | SSSSOOOS | analogue for | Human HTT |
| | | | A*SG*SmAmCmUmU*SmC | | | CMC | |
| WV-2686 | GGCACAAGGGC | 2057 | mG*SmGmCmAmC*SA*SA | 2409 | SOOOSSSSRSS | WV-1092 | rs362307 |
| | ACAGACUUC | | *SG*SG*RG*SC*SA*SC*S | | SSSSOOOS | analogue for | Human HTT |
| | | | A*SG*SmAmCmUmU*SmC | | | CMC | |
| WV-2687 | GGCACAAGGGC | 2058 | mG*SmGmCmAmC*SA*SA | 2410 | SOOOSSSSSRS | WV-1092 | rs362307 |
| | ACAGACUUC | | *SG*SG*SG*RC*SA*SC*S | | SSSSOOOS | analogue for | Human HTT |
| | | | A*SG*SmAmCmUmU*SmC | | | CMC | |
| WV-2688 | GGCACAAGGGC | 2059 | mG*SmGmCmAmC*SA*SA | 2411 | SOOOSSSSSSR | WV-1092 | rs362307 |
| | ACAGACUUC | | *SG*SG*SG*SC*RA*SC*S | | SSSSOOOS | analogue for | Human HTT |
| | | | A*SG*SmAmCmUmU*SmC | | | CMC | |
| WV-2689 | GGCACAAGGGC | 2060 | mG*SmGmCmAmC*SA*SA | 2412 | SOOOSSSSSSS | WV-1092 | rs362307 |
| | ACAGACUUC | | *SG*SG*SG*SC*SA*RC*S | | RSSSOOOS | analogue for | Human HTT |
| | | | A*SG*SmAmCmUmU*SmC | | | CMC | |
| WV-2690 | GGCACAAGGGC | 2061 | mG*SmGmCmAmC*SA*SA | 2413 | SOOOSSSSSSS | WV-1092 | rs362307 |
| | ACAGACUUC | | *SG*SG*SG*SC*SA*SC*S | | SSRSOOOS | analogue for | Human HTT |
| | | | A*RG*SmAmCmUmU*SmC | | | CMC | |
| WV-2691 | GGCACAAGGGC | 2062 | mG*SmGmCmAmC*SA*SA | 2414 | SOOOSSSSSSS | WV-1092 | rs362307 |
| | ACAGACUUC | | *SG*SG*SG*SC*SA*SC*S | | SSSROOOS | analogue for | Human HTT |
| | | | A*SG*RmAmCmUmU*SmC | | | CMC | |
| WV-2692 | GGCACAAGGGC | 2063 | mG*SmGmCmAmC*SA*SA | 2415 | SOOOSSSSSSS | WV-1092 | rs362307 |
| | ACAGACUUC | | *SG*SG*SG*SC*SA*SC*S | | SSSSOOOR | analogue for | Human HTT |
| | | | A*SG*SmAmCmUmU*RmC | | | CMC | |
| WV-2728 | GGCAC | | mG*SmGmCmAmC | | SOOO | WV-1092 | rs362307 |
| | | | | | | fragment for | Human HTT |
| | | | | | | CMC | |
| WV-2729 | GGCAC | | mG*RmGmCmAmC | | ROOO | WV-1092 | rs362307 |
| | | | | | | fragment for | Human HTT |
| | | | | | | CMC | |
| WV-2730 | ACUUC | | mAmCmUmU*SmC | | OOOS | WV-1092 | rs362307 |
| | | | | | | fragment for | Human HTT |
| | | | | | | CMC | |
| WV-2731 | ACUUC | | mAmCmUmU*RmC | | OOOR | WV-1092 | rs362307 |
| | | | | | | fragment for | Human HTT |
| | | | | | | CMC | |
| WV-2732 | GGCACAAGGGC | 2064 | mG*SmGmCmAmC*SA*SA | 2416 | SOOOSSSSSSR | WV-1092 for | rs362307 |
| | ACAGACUUC | | *SG*SG*SG*SC*RA*SC*R | | SRSSOOOS | CM | Human HTT |
| | | | A*SG*SmAmCmUmU*SmC | | | | |

Abbreviations:
2\′: 2′
3\′: 3′
5\′: 5′
307: SNP rs362307
C6: C6 amino linker
F, f: 2′-F
Htt, HTT: Huntingtin gene or Huntington's Disease Laurie, Myristic, Palmitic, Stearic, Oleic, Linoleic, alpha-Linolenic, gamma-Linolenic, DHA, Turbinaric, Dilinoleic: Laurie acid, Myristic acid, Palmitic acid, Stearic acid, Oleic acid, Linoleic acid, alpha-Linolenic acid, gamma-Linolenic acid, docosahexaenoic acid, Turbinaric acid, Dilinoleyl methanol, spectively.
muHtt or muHTT: mutant Huntingtin gene or gene product
OMe: 2′-OMe
O, PO: phoshodiester (phosphate)
*, PS: Phosphorothioate
R, Rp: Phosphorothioate in Rp conformation
S, Sp: Phosphorothioate in Sp conformation
X: Phosphorothioate, stereorandom

[1559] In some embodiments, a composition or method described herein can pertain to any biologically active agent described herein, which can target any gene described herein, and any lipid described herein.

[1560] In some embodiments, a composition or method described herein can pertain to any biologically active agent described herein and any lipid described herein, for the treatment of any disease described herein.

[1561] In some embodiments, a composition or method described herein can pertain to any biologically active agent described herein and any lipid described herein.

[1562] Efficacy of Composition for Delivery of a Biologically Active Agent

[1563] In some embodiments, a composition for delivery of a biologically active agent is capable of performing two different functions: (a) delivering the biologically active agent (e.g., to particular targeted cells or tissues); and (b) allowing (e.g., not preventing or interfering with) the function of the biologically active agent. In some embodiments, a lipid increase the efficacy, activity, stability, bio-availability, tissue targeting, and/or biological half-life of a biologically active agent.

[1564] As shown in FIG. 1, certain example lipids for use in preparation of a composition for delivery of a biologically active agent allow (e.g., do not prevent or interfere with) the function of the biologically active agent. Non-limiting example lipids include: lauric acid, myristic acid, palmitic acid, stearic acid, oleic acid, linoleic acid, alpha-linolenic acid, gamma-linolenic acid, docosahexaenoic acid (DHA or cis-DHA), turbinaric acid and dilinoleyl.

[1565] A biologically active agent, oligonucleotide WV-942, was tested for its biological activity in human DMD (Duchenne muscular dystrophy) myoblasts. In the absence of exon 51 skipping, the protein is severely truncated due to a frameshift mutation, leading to a premature stop codon. Oligonucleotide WV-942, which has a sequence and chemical identical to Drisapersen, also known as Kyndrisa, PRO051 and GSK2402968, is intended to allow skipping of exon 51, thus allowing production of a frame-corrected dystrophin transcript which lacks exon 51. Experimental details are provided in Example 2.

[1566] In this experiment, the myoblast cells were treated with naked WV-942 (not conjugated to any lipid), or WV-942 conjugated to any one of several lipids: lauric acid, myristic acid, palmitic acid, stearic acid, oleic acid, linoleic acid, alpha-linolenic acid, gamma-linolenic acid, docosahexaenoic acid (cis-DHA), turbinaric acid and dilinoleyl.

TABLE 1
Lipids conjugated to biologically active agent,
oligonucleotide WV-942.

| Oligonucleotide | Conjugated Acid |
|---|---|
| WV-942 | — |
| WV-2578 | Lauric acid |
| WV-2579 | Myristic Acid |
| WV-2580 | Palmitic acid |
| WV-2581 | Stearic acid |
| WV-2582 | Oleic acid |
| WV-2583 | Linoleic acid |
| WV-2584 | Alpha-Linolenic acid |
| WV-2585 | Gamma-Linolenic acid |
| WV-2586 | cis-DHA |
| WV-2587 | Turbinaric acid |
| WV-2588 | Dilinoleyl |

[1567] These results show that preparing a composition comprising a biologically active agent, WV-942, and any of several lipids (lauric acid, myristic acid, palmitic acid, stearic acid, oleic acid, linoleic acid, alpha-linolenic acid, gamma-linolenic acid, docosahexaenoic acid (cis-DHA), turbinaric acid and dilinoleyl) did not prevent biological activity of the agent; in fact, in several cases, in the addition of a lipid, biological activity was increased several-fold.

[1568] Among other things, the present disclosure encompasses the recognition that lipids can surprisingly enable and/or promote delivery of biologically active agents to their target location(s) (e.g., cells, tissues, organs, etc.) In some embodiments, lipids can be utilized to effectively improve delivery of biologically active agents to their target location(s) in a subject, e.g., in a mammal or human subject, etc. The present disclosure particularly documents the surprising achievement of efficient and/or effective delivery of biologically active agent(s) into cells (i.e., to intracellular location(s)). The present disclosure also shows the additional surprising finding that lipids can improve the pharmacokinetics (e.g., optimized half-life) of an administered biologically active agent. The present disclosure also documents the additional surprising finding that lipids can be utilized to improve immune characteristics of delivered biologically active agents, e.g., by antagonizing an immune response mediated by TLR9.

[1569] Targeting of Particular Cells or Tissues

[1570] In some embodiments, a composition for delivery of a biologically active agent is capable of targeting the biologically active agent to particular cells or tissues, as desired.

[1571] In some embodiments, a composition for delivery of a biologically active agent is capable of targeting the biologically active agent to a muscle cell or tissue. In some embodiments, the present disclosure pertains to compositions and methods related to delivery of biologically active agents, wherein the compositions comprise a biologically active agent a lipid. In various embodiments to a muscle cell or tissue, the lipid is selected from: lauric acid, myristic acid, palmitic acid, stearic acid, oleic acid, linoleic acid, alpha-linolenic acid, gamma-linolenic acid, docosahexaenoic acid (cis-DHA), turbinaric acid and dilinoleyl.

[1572] As shown in FIGS. 2 to 6, example compositions were prepared comprising a biologically active agent (WV-942) and a lipid, and these compositions were capable of delivering the biologically active agent to target cells and tissues, e.g., muscle cells and tissues. The example lipids used include stearic acid, oleic acid, alpha-linolenic acid, gamma-linolenic acids, cis-DHA, turbinaric acid and dilinoleyl acid. In these figures, “TBD” indicates that the particular composition was effective for delivery, but the numerical results were outside the standard range, and thus the final results remain to be determined; however, the compositions indicated as “TBD” in the Figures were efficacious at delivery of a biologically active agent.

[1573] As shown in FIG. 3: A composition comprising a biologically active agent and any of: stearic acid, oleic acid, alpha-linolenic acid, gamma-linolenic acid, cis-DHA or turbinaric acid, was able to deliver the biologically active agent to gastrocnemius muscle tissue.

[1574] A composition comprising a biologically active agent and any of: stearic acid, alpha-linolenic, gamma-linolenic, cis-DHA, or turbinaric acid, was able to deliver the biologically active agent to heart muscle tissue.

[1575] A composition comprising a biologically active agent and any of: stearic acid, oleic acid, alpha-linolenic acid, gamma-linolenic acid, cis-DHA or turbinaric acid, was able to deliver the biologically active agent to quadriceps muscle tissue.

[1576] As shown in FIG. 4: A composition comprising a biologically active agent and any of: stearic, oleic, alpha-linolenic, gamma-linolenic, cis-DHA, or turbinaric acid was able to deliver the biologically active agent to the gastrocnemius muscle tissue.

[1577] A composition comprising a biologically active agent and any of: stearic acid, alpha-linolenic, gamma-linolenic, cis-DHA, or turbinaric acid was able to deliver the biologically active agent to heart muscle tissue.

[1578] A composition comprising a biologically active agent and any of: dilinoleyl, stearic acid, oleic acid, alpha-linolenic, gamma-linolenic, cis-DHA or turbinaric acid was able to delivery the biologically active agent to the thoracic diaphragm muscle tissue.

[1579] In some embodiments, conjugation of a lipid to an oligonucleotide improves at least one characteristic of the oligonucleotide. In some embodiments, the characteristic is increased activity (e.g., increased ability to induce desireable skipping of a deleterious exon), decreased toxicity, or improved distribution to a tissue. In some embodiments, the tissue is muscle tissue. In some embodiments, the tissue is skeletal muscle, gastrocnemius, triceps, heart or diaphragm.

[1580] The ability of conjugation of lipids to improve the distribution of oligonucleotides is shown in FIGS. 31A to 31D.

[1581] The tested oligonucleotides (WV-3473, WV-3545, WV-3546 and WV-942) were intravenous injected via tail vein in male C57BL/10ScSndmdmdx mice (4-5 weeks old), at 10 mg/kg or 30 mg/kg. Tissues were harvested on Day 2, 7 and 14 after injection, fresh-frozen in liquid nitrogen and stored in −80° C. until analysis.

[1582] Hybrid-ELISA is used to quantify the ASO levels in tissue using test article serial dilution as standard curve: Maleic anhydride activated 96 well plate (Pierce 15110) was coated 50 μL of capture probe at 500 nM in 2.5% NaHCO₃(Gibco, 25080-094) for 2 hours at 37° C. The plate then washed 3 times with PBST (PBS+0.1% Tween-20), blocked with 5% fat free milk-PBST at 37° C. for 1 hour. Test article ASO was serial diluted into matrix. This standard together with original samples were diluted with lysis buffer (4 M Guanidine; 0.33% N-Lauryl Sarcosine; 25 mM Sodium Citrate; 10 mM DTT) so that ASO amount in all samples is less than 100 ng/ml. 20 μL of diluted samples were mixed with 180 μL of 333 nM detection probe diluted in PBST, then denatured in PCR machine (65° C., 10 min, 95° C., 15 min, 4° C. ∞). 50 μL of denatured samples were distributed in blocked ELISA plate in triplicates, and incubated overnight at 4° C. After 3 washes of PBST, 1:2000 streptavidin-AP in PBST was added, 50 μL per well and incubated at room temperature for 1 hour. After extensive wash with PBST, 100 μL of AttoPhos (Promega S1000) was added, incubated at room temperature in dark for 10 min and read on plate reader (Molecular Device, M5) fluorescence channel: Ex 435 nm, Em 555 nm. The ASO in samples were calculated according to standard curve by 4-parameter regression.

[1583] In some embodiments, for example as shown in certain Figures, WV-3473 has no detectable level in Gastrocnemius, Triceps, Heart or Diaphragm, in contrast to WV-942. The stability of WV-3473 is good in both plasma and tissue homogenates. In some embodiments, for example as demonstrated in certain Figures, lipid-conjugation of WV-3473 improves the muscle distribution of WV-3473, often without impacting removal of oligonucleotides from a system.

[1584] Thus: A composition comprising a lipid, selected from: lauric acid, myristic acid, palmitic acid, stearic acid, oleic acid, linoleic acid, alpha-linolenic acid, gamma-linolenic acid, docosahexaenoic acid (cis-DHA), turbinaric acid and dilinoleyl, and a biologically active agent is capable of delivering the biologically active agent to extra-hepatic cells and tissues, e.g., muscle cells and tissues.

### Pharmacokinetics

[1585] In some embodiments, one or more characteristics of pharmacokinetics of a drug (e.g., a drug comprising a biologically active agent, including but not limited to an oligonucleotide) can be optimized by conjugation with a lipid.

[1586] In some embodiments, pharmacokinetics pertains to analysis of drug metabolism, including analysis of the fate of a drug from the moment of administration to the time of elimination from the body. Pharmacokinetics can encompass, as a non-limiting example, the quantification of a drug or its metabolite in a particular tissue (e.g., blood or muscle) over time.

[1587] Various pharmacokinetic characteristics include, but are not limited to: Cₘₐₓ, peak plasma concentration of a drug after administration; tₘₐₓ, time to reach Cₘₐₓ; Cₘᵢₙ, lowest (trough) concentration that a drug reaches before the next dose is administered; Elimination half-life, the time required for the concentration of the drug to reach half of its original value; Elimination rate constant, rate at which a drug is removed from the body; Area under the curve, integral of the concentration-time curve (after a single dose or in steady state); and Clearance, volume of plasma cleared of the drug per unit time.

[1588] Various pharmacokinetic characteristics of a particular drug can be influenced by any one or more of: total dose, number of dosages, rate of administration, method of administration, administration vehicle, bodily site of administration, etc. Various characteristics of pharmacokinetics and various influences on them are known in the art.

[1589] The present disclosure, among other things, shows that one or more characteristics of pharmacokinetics of a drug comprising a biologically active agent (e.g., an oligonucleotide) can be affected, improved and/or optimized by conjugation of the agent to a lipid.

[1590] In general, it is noted that optimization of a pharmacokinetic characteristic such as half-life can be distinguished from maximization. In some embodiments, in general, it may be desireable for a particular drug to have a half-life sufficient to allow performance of its desired function, but short enough to minimize off-target effects and other toxicity. Thus, in some embodiments, an optimized half-life is long enough to allow activity while minimizing toxicity; a prolonged or maximized half-life may be undesireable.

[1591] The present disclosure shows that conjugation with a lipid can improve the half-life of a biologically active agent. FIGS. 31A to 31D show the distribution of oligonucleotides (including some conjugated to a lipid) in various muscle tissues. Muscles tested include: gastrocnemius (FIG. 31A); triceps (FIG. 31B); heart (FIG. 31C); and diaphragm (FIG. 31D). Control oligonucleotide WV-942 is equivalent to Drisapersen, which has an undesirably long half-life, which can contribute to toxicity. Test oligonucleotide WV-3473 was administered to animals naked, or conjugated to a lipid (stearic acid, WV-3545; or turbinaric acid, WV-3546). In some of the assays, conjugation to a lipid improved half-life of the oligonucleotide, without extending it to an undesirably long length. See, for example, FIG. 30C, which shows that conjugation of either stearic acid or turbinaric acid to the oligonucleotide, which administered at 30 mg/kg, increased distribution to heart tissue, particularly at Day 3 and 8, but did not increase it to the level of WV-942, which is known to have an undesirably long half-life.

### Lipids, Immunostimulation and TLR9

[1592] In some embodiments, the present disclosure encompasses the surprising finding that lipid conjugation can effectively antagonize an immune response, e.g., that mediated by TLR9.

[1593] In some embodiments, example data demonstrated that many of provided oligonucleotides do not mediate an immune response, as determined by a lack of agonism of hTLR9; see FIG. 26. Among other things, the present disclosure demonstrates that oligonucleotides conjugated to lipids surprisingly counteracted hTLR9 agonism, for example, that mediated by control oligonucleotide ODN2006 (e.g., conjugation of lipids to oligonucleotides antagonizes hTLR9 activity mediated by ODN2006); for examples, see FIGS. 27 and 28, WV-3545 and WV-3546 (which are oligonucleotides to the target Dystrophin). Other oligonucleotides comprising lipid moieties were also tested and were shown to have greatly enhanced ability to antagonize hTLR9 activity. For example, WV-2824 and WV-2830, conjugates of Malat1-targeting WV-2735 with stearic acid (WV-2824) and turbinaric acid (WV-2830), respectively, also demonstrated greatly enhanced ability to antagonize hTLR9 activity mediated by ODN2006. Among other things, these experiments show that conjugation of lipids, such as stearic acid, turbinaric acid, etc., with oligonucleotides can greatly increase hTLR9 antagonist activity.

[1594] TLR9 is Toll-Like Receptor 9, also known as CD289; RefSeq (mRNA) NM_017442; RefSeq (protein) NP_059138. hTLR9 is human TLR9.

[1595] Microarray

[1596] In some embodiments, the present disclosure pertains to a microarray comprising a collection of one or more chirally controlled oligonucleotides. In some embodiments, a microarray comprises multiple spatially defined regions, wherein each region comprises a chirally controlled oligonucleotide composition. In some embodiments, a microarray comprises a solid phase support having a surface (e.g., a planar surface), which carries a collection of types of chirally controlled oligonucleotides, wherein each type is immobolized to a spatially defined region or site on the surface, wherein the region or site of one type does not overlap with the region or site of any other type. In some embodiments, oligonucleotides of different types can differ in base sequence (e.g., comprising overlapping or tiled sequences), pattern of backbone modification, pattern of stereochemistry, and/or conjugation with any of a variety of lipids or other moieties.

[1597] In some embodiments, a microarray can be used in for a variety of purposes. In some embodiments, a microarray can be used to test the comparative qualities of various aspects (e.g., base sequence, pattern of backbone modification, pattern of stereochemistry, and/or conjugation with a lipid or other moiety) of different types of oligonucleotides. In some embodiments, different types of oligonucleotides can be tested for their ability to bind to particular target proteins or nucleic acids, ability to mediate RNA interference, ability to alter exon skipping (e.g., increasing desired skipping or decrease undesired skipping), ability to mediate knockdown via a RNAseH mechanism, resistance to nucleases, immunogenicity, TLR9 agonism and/or antagonism, etc. Using a microarray, in some embodiments multiple types of oligonucleotides can be exposed to the same experimental fluids and test conditions, and thus multiple types of oligonucleotides can be simultaneously tested. As a non-limiting example, in order to test resistance of multiple types of oligonucleotides to a nuclease, various types of oligonucleotides can be immobolized in different regions on a microarray, which is then subjected to a fluid comprising a nuclease. The relative resistance of various oligonucleotide types to nuclease degradation can be readily determined. As another non-limiting example, in order to test the relative ability of different oligonucleotide types to mediate RNA interference, different types can be immobolized in different regions of a microarray, which is then treated with a fluid comprising the various components required for testing RNA interference (mRNA target, RNA interference complex, buffer, detection moieties, etc.); the relative ability of different oligonucleotide types to mediate RNA interference can thus be readily determined. Any method known in the art can be used to determine the relative activity of interest of each oligonucleotide type, including but not limited to: detection or use of fluorescent, chemiluminescent, chemical, or radioactive markers, labels or dyes.

[1598] Methods of producing microarrays, which may also be referred to as gene chips, gene arrays, or nucleic acid chips, or by other terms, are known in the art and can be used in accordance with the present disclosure. In some embodiments, microarrays are produced by robots. In some embodiments, a method of producing a microarray comprises a step of separately producing various oligonucleotide types and then a step of depositing various oligonucleotide types on designated regions of a microarray. In some embodiments, for each oligonucleotide type, a fine needle or pin is dipped into a well comprising that type, and the needle or pin used to deposit each type onto a microarray. In some embodiments, a method of producing a microarray comprises a step of polymerizing various oligonucleotide types on designated regions of a microarray. Various methods of making microarrays are known in the art. Also known in the art are various materials from which a microarray can be constructed (glass, plastic, polystyrene, etc.).

[1599] In some embodiments, a microarray comprises a collection of beads, wherein each bead is physically discrete from each other, but wherein various beads are mixed or combined in a single sample. Each bead or type of bead (e.g., a particular type of bead to which is immobilized an oligonucleotide type) can comprise, for example, a specific ratio of two or more quantification agents (e.g., dyes), such that beads can be differentiated and the relative activity of each oligonucleotide type can be determined.

[1600] In some embodiments, the present disclosure pertains to a collection of types of oligonucleotide types, wherein each type is defined by any one or more of: base sequence, pattern of backbone modification, pattern of stereochemistry, and/or conjugation with a lipid or other moiety. The collection (e.g., a microarray) can be used to test the relative qualities or abilities or various oligonucleotide types.

[1601] Additional Optional Components of the Composition

[1602] In some embodiments, the present disclosure pertains to compositions and methods related to delivery of biologically active agents, wherein the compositions comprise a biologically active agent and a lipid comprising a C₁₀-C₄₀ linear, saturated or partially unsaturated, aliphatic chain. In some embodiments, the present disclosure pertains to compositions and methods related to delivery of biologically active agents, wherein the compositions comprise a biologically active agent and a lipid comprising a C₁₀-C₄₀ linear, saturated or partially unsaturated, aliphatic chain, optionally substituted with one or more C₁₋₄ aliphatic group.

[1603] In some embodiments, the present disclosure pertains to compositions and methods related to delivery of biologically active agents, wherein the compositions comprise a biologically active agent and a lipid. In various embodiments, the lipid is selected from: lauric acid, myristic acid, palmitic acid, stearic acid, oleic acid, linoleic acid, alpha-linolenic acid, gamma-linolenic acid, docosahexaenoic acid (cis-DHA), turbinaric acid and dilinoleyl.

[1604] In various embodiments, the composition for delivery of a biologically active agent further comprises an additional, optional, component. In various embodiments, the additional optional component is selected from: one or more additional lipids; a targeting compound or moiety; a 3′ end cap (in the example of a nucleic acid); and a carbonic anhydrase inhibitor.

[1605] In some embodiment, a composition comprises a lipid, a biologically active agent and any one or more additional components selected from: a polynucleotide, a dye, an intercalating agent (e.g. an acridine), a cross-linker (e.g. psoralene, or mitomycin C), a porphyrin (e.g., TPPC4, texaphyrin, or Sapphyrin), a polycyclic aromatic hydrocarbon (e.g., phenazine, or dihydrophenazine), an artificial endonuclease, a chelating agent, EDTA, an alkylating agent, a phosphate, an amino, a mercapto, a PEG (e.g., PEG-40K), MPEG, [MPEG]₂, a polyamino, an alkyl, a substituted alkyl, a radiolabeled marker, an enzyme, a hapten (e.g. biotin), a transport/absorption facilitator (e.g., aspirin, vitamin E, or folic acid), a synthetic ribonuclease, a protein, e.g., a glycoprotein, or peptide, e.g., a molecule having a specific affinity for a co-ligand, or antibody e.g., an antibody, a hormones, a hormone receptor, a non-peptidic species, a lipid, a lectin, a carbohydrate, a vitamin, a cofactor, a carbonic anhydrase inhibitor, or a drug.

[1606] In some embodiment, a composition comprises a lipid, a biologically active agent and any one or more additional components, wherein the one or more additional components comprises or consists of a carbonic anhydrase inhibitor. Carbonic anhydrases are a family of 16 members that regulate intracellular and extracellular pH. In some embodiments, the expression of the CA3 gene is strictly tissue-specific and present at high levels in skeletal muscle and much lower levels in cardiac and smooth muscle. In some embodiments, CA3 is insufficient in muscles of Myasthenia Gravis patients. In some embodiments, a proportion of carriers of Duchenne muscle dystrophy have a higher CA3 level than normal. In some embodiments, CA IV, the first membrane-associated isoform to be studied, is expressed in a wide variety of tissues including kidney, heart, lung, gall bladder, distal small intestine, colon, and skeletal muscle. In some embodiments, in human tissues CA XIV is expressed in heart, followed by brain, skeletal muscle, and liver; no signal was seen in lung or kidney. In some embodiments, a carbonic anhydrase inhibitor inhibits a CA3, CA IV, CA XIV and/or any one or more CA genes and/or gene products. A non-limiting example of a CA inhibitor, along with a linker for linking the CA inhibitor to a biologically active agent, is shown in FIG. 30.

### Additional Lipids

[1607] In some embodiments, the present disclosure pertains to compositions and methods related to a composition comprising a biologically active agent and a lipid comprising a C₁₀-C₄₀ linear, saturated or partially unsaturated, aliphatic chain. In some embodiments, the present disclosure pertains to compositions and methods related to a composition comprising a biologically active agent and a lipid comprising a C₁₀-C₄₀ linear, saturated or partially unsaturated, aliphatic chain, optionally substituted with one or more C₁₋₄ aliphatic group.

[1608] In some embodiments, the present disclosure pertains to compositions and methods related to a composition comprising: a biologically active agent; a lipid comprising a C₁₀-C₄₀ linear, saturated or partially unsaturated, aliphatic chain; and an additional lipid or lipids. In some embodiments, the present disclosure pertains to compositions and methods related to a composition comprising: a biologically active agent; a lipid comprising a C₁₀-C₄₀ linear, saturated or partially unsaturated, aliphatic chain, optionally substituted with one or more C₁₋₄ aliphatic group; and an additional lipid or lipids.

[1609] In various embodiments, the composition for delivery of a biologically active agent comprises: a biologically active agent; a lipid selected from: lauric acid, myristic acid, palmitic acid, stearic acid, oleic acid, linoleic acid, alpha-linolenic acid, gamma-linolenic acid, docosahexaenoic acid (cis-DHA), turbinaric acid and dilinoleyl; and an additional lipid or lipids.

[1610] In some embodiments, an additional lipid or lipids is selected from: lauric acid, myristic acid, palmitic acid, stearic acid, oleic acid, linoleic acid, alpha-linolenic acid, gamma-linolenic acid, docosahexaenoic acid (cis-DHA), turbinaric acid and dilinoleyl. As a non-limiting example: In various embodiments, the composition for delivery of a biologically active agent comprises a biologically active agent, and two or more lipids selected from: lauric acid, myristic acid, palmitic acid, stearic acid, oleic acid, linoleic acid, alpha-linolenic acid, gamma-linolenic acid, docosahexaenoic acid (cis-DHA), turbinaric acid and dilinoleyl.

[1611] In various embodiments, the additional lipid or lipids can be selected from: an amino lipid; an amphipathic lipid; an anionic lipid; an apolipoprotein; a cationic lipid; a low molecular weight cationic lipid; a cationic lipid such as CLinDMA and DLinDMA; an ionizable cationic lipid; a cloaking component; a helper lipid; a lipopeptide; a neutral lipid; a neutral zwitterionic lipid; a hydrophobic small molecule; a hydrophobic vitamin; a PEG-lipid; an uncharged lipid modified with one or more hydrophilic polymers; phospholipid; a phospholipid such as 1,2-dioleoyl-sn-glycero-3-phosphoethanolamine; a stealth lipid; a sterol; a cholesterol; and a targeting lipid or other targeting component; and any other lipid described herein or reported in the art. In various embodiments, the additional lipids can comprise a combination of lipids, as a non-limiting example, an amino-lipid, a cationic lipid, a helper lipid and/or a PEG-lipid and/or a hydrophobic small molecule. Additional components that may be present in a lipid particle include bilayer stabilizing components such as polyamide oligomers (see, U.S. Pat. No. 6,320,017), peptides, proteins, detergents, lipid-derivatives, such as PEG coupled to phosphatidylethanolamine and PEG conjugated to ceramides (see, U.S. Pat. No. 5,885,613).

[1612] The types and ratios of various lipids (e.g., a lipid and an additional, optional lipid or lipids) in the composition can be modulated to perform any one or more of the following: improve cellular or tissue targeting; improve cellular uptake; improve endosomal escape; reduce liver toxicity; increase efficiency of delivery; increase tolerability; improve consistency in size of lipid nanoparticles; reduce aggregation of lipid nanoparticles; prevent charge-induced aggregation of lipid nanoparticles; improve chemical stability, improve half-life in circulation, and/or reduce degradation of the biologically active agent (e.g., by nucleases in the case of nucleic acids, or proteases in the case of proteins).

[1613] The composition for delivery of the present disclosure can be in the form of a lipid nanoparticle (LNP). As used herein, the term “lipid nanoparticles” includes liposomes irrespective of their lamellarity, shape or structure and lipoplexes as described for the introduction of pDNA into cells (PNAS, 1987, 84, 7413). These lipid nanoparticles can be complexed with biologically active agents and are useful as in vivo delivery vehicles.

[1614] Various lipids are described below, and/or reported in the art, including, as non-limiting examples: U.S. Pat. Nos. 9,315,437; 9,278,130; 9,254,327; 9,242,001; and 9,220,785; US patent applications: US 2009/0263407, US 2009/0285881, US 2010/0055168, US 2010/0055169, US 2010/0063135, US 2010/0076055, US 2010/0099738, and US 2010/0104629; Semple S. C. et al., Rational design of cationic lipids for siRNA delivery, Nature Biotechnology, published online 17 Jan. 2010; doi:10.1038/nbt.1602; and documents cited therein.

[1615] In some embodiments, an additional lipid or lipids comprises an amino lipid. As a non-limiting example, an amino lipid includes a lipid having at least one nitrogen atom incorporated in at least one fatty acid chain. This fatty acid chain may be an alkyl, alkenyl or alkynyl carbon chain. As non-limiting examples, lipids contain carbon chain lengths in the range from C10 to C20. The fatty acid portion of the amino-lipid can be incorporated through the use of suitable carbonyl compounds such as aldehydes (R—CHO) and ketones (R—CO—R). Through the use of asymmetrical ketones (R—CO—R′) corresponding unsymmetrical substituted lipids can be prepared. Likewise, through the use of carbonyl ethers, esters, carbamates and amides and suitable reducing agents the corresponding amino-lipids are accessible.

[1616] In some embodiments, an additional lipid or lipids comprises an amphipathic lipid. As a non-limiting example, an amphipathic lipid includes any suitable material, wherein the hydrophobic portion of the lipid material orients into a hydrophobic phase, while the hydrophilic portion orients toward the aqueous phase. Such compounds include, but are not limited to, phospholipids, aminolipids, and sphingolipids. Additionally, such amphipathic lipids can be readily mixed with other lipids, such as triglycerides and sterols.

[1617] In some embodiments, an additional lipid or lipids comprises an anionic lipid. As non-limiting examples, an anionic lipid includes a compound selected from phosphatidylglycerol, cardiolipin, diacylphosphatidylserine, diacylphosphatidic acid, N-dodecanoyl phosphatidylethanoloamine, N-succinyl phosphatidylethanolamine, N-glutaryl phosphatidylethanolamine, lysylphosphatidylglycerol and other anionic modifying groups joined to neutral lipids.

[1618] In some embodiments, an additional lipid or lipids comprises an apolipoprotein, also known as a lipoprotein, or a fragment thereof. As non-limiting examples, apolipoproteins include ApoA-I, ApaA-II, ApoA-IV, ApaA-V and ApoE, and active polymorphic forms, isoforms, variants and mutants as well as fragments or truncated forms thereof. In certain embodiments, the apolipoprotein is a thiol-containing apolipoprotein, which contains at least one cysteine residue. The most common thiol-containing apolipoproteins are ApoA-I Milano (ApoA-I_{M}) and ApoA-I Paris (ApoA-I_{P}), which contain one cysteine residue (Jia et al., 2002, Biochem. Biophys. Res. Comm. 297: 206-13; Bielicki and Oda, 2002, Biochemistry 41: 2089-96). ApoA-II, ApoE2 and ApoE3 are also thiol-containing apolipoproteins. Isolated ApoE and/or active fragments and polypeptide analogues thereof, including recombinantly produced forms thereof, are described in U.S. Pat. Nos. 5,672,685; 5,525,472; 5,473,039; 5,182,364; 5,177,189; 5,168,045; and 5,116,739. ApoE3 is disclosed in Weisgraber, et al., “Human E apoprotein heterogeneity: cysteine-arginine interchanges in the amino acid sequence of the apo-E isoforms,” J. Biol. Chem. (1981) 256: 9077-9083; and Rall, et al., “Structural basis for receptor binding heterogeneity of apolipoprotein E from type III hyperlipoproteinemic subjects,” Proc. Nat. Acad. Sci. (1982) 79: 4696-4700. See also GenBank accession number K00396. In certain embodiments, the apolipoprotein can be in its mature form, in its (preproapolipoprotein form or in its proapolipoprotein form, Homo- and heterodimers (where feasible) of pro- and mature ApoA-I (Duverger et al., 1996, Arterioscler. Thromb. Vase. Biol. 16(12):1424-29), ApoA-I Milano (Klon et al., 2000, Biophys. J. 79:(3) 1679-87; Franceschini et al., 1985, J. Biol. Chem. 260: 1632-35), ApoA-I Paris (Daum et al., 1999, J. Mol. Med. 77:614-22), ApoA-II (Shelness et al., 1985, J. Biol. Chem. 260(14):8637-46; Shelness et al., 1984, J. Biol. Chem. 259(15):9929-35), ApoA-IV (Duverger et al., 1991, Euro. J. Biochem. 201(2):373-83), and ApoE (McLean et al., 1983, J. Biol. Chem. 258(14):8993-9000) can also be utilized.

[1619] In some embodiments, an additional lipid or lipids comprises a cationic lipid. In a non-limiting example, a cationic lipid is an amino lipid. As a non-limiting example, a cationic lipid includes a lipid comprising a quaternary amine with a nitrogen atom having four organic substituents. Non-limiting examples of cationic lipids comprising a quaternary amine include N-(2,3-dioleyloxy)propyl)-N,N,N-trimethylammonium chloride (“DOTAP”), N,N,-Distearyl-N,N-dimethylammonium bromide (“DDBA”), 1-methyl-4-(cis-9-dioleyl)-methylpyridinium-chloride (“SAINT-solid”)N-(2,3-dioleyloxy)propyl)-N,N,N-triethylammonium chloride (“DOTMA”), N,N-dioleyl-N,N-dimethylammonium chloride (“DODAC”), (1,2-dimyristyloxyprop-3-yl)-N,N-dimethyl-N-hydroxyethyl ammonium bromide (“DIMRIE”), N,N-dioleyl-N,N-dimethylammonium chloride (“DODAC”); N-(2,3-dioleyloxy)propyl-N,N—N-triethylammonium chloride (“DOTMA”); N,N-distearyl-N,N-dimethylammonium bromide (“DDAB”); N-(2,3-dioleoyloxy)propyl)-N,N,N-trimethylammonium chloride (“DOTAP”); 1,2-Dioleyloxy-3-trimethylaminopropane chloride salt (“DOTAP.Cl”); 3beta-(N—(N′,N′-dimethylaminoethane)-carbamoyl)cholesterol (“DC-Chol”), N-(1-(2,3-dioleyloxy)propyl)-N-2-(sperminecarboxamido)ethyl)-N,N-dimethyl-ammonium trifluoracetate (“DOSPA”), dioetadecylamidoglycyl carboxyspermine (“DOGS”), 1,2-dileoyl-sn-3-phosphoethanolamine (“DOPE”), 1,2-dioleoyl-3-dimethylammonium propane (“DODAP”), N,N-dimethyl-2,3-dioleyloxy)propylamine (“DODMA”), and N-(1,2-dimyristyloxyprop-3-yl)-N,N-dimethyl-N-hydroxyethyl ammonium bromide (“DMRIE”). Additionally, a number of commercial preparations of cationic lipids can be used, such as, e.g., LIPOFECTIN (including DOTMA and DOPE, available from GIBCO/BRL), and LIPOFECTAMINE, (comprising DOSPA and DOPE, available from GIBCO/BRL). As a non-limiting example, a cationic lipid can have certain design features including a head group, one or more hydrophobic tails, and a linker between the head group and the one or more tails. The head group can include an amine; for example an amine having a desired pKₐ. The pKₐ can be influenced by the structure of the lipid, particularly the nature of head group; e.g., the presence, absence, and location of functional groups such as anionic functional groups, hydrogen bond donor functional groups, hydrogen bond acceptor groups, hydrophobic groups (e.g., aliphatic groups), hydrophilic groups (e.g., hydroxyl or methoxy), or aryl groups. The head group amine can be a cationic amine; a primary, secondary, or tertiary amine; the head group can include one amine group (monoamine), two amine groups (diamine), three amine groups (triamine), or a larger number of amine groups, as in an oligoamine or polyamine. The head group can include a functional group that is less strongly basic than an amine, such as, for example, an imidazole, a pyridine, or a guanidinium group. The head group can be zwitterionic. Other head groups are suitable as well. The one or more hydrophobic tails can include two hydrophobic chains, which may be the same or different. The tails can be aliphatic; for example, they can be composed of carbon and hydrogen, either saturated or unsaturated but without aromatic rings. The tails can be fatty acid tails; some such groups include octanyl, nonanyl, decyl, lauryl, myristyl, palmityl, stearyl, alpha-linoleyl, stearidonyl, linoleyl, gamma-linolenyl, arachadonyl, oleyl, and others. Other hydrophobic tails are suitable as well. The linker can include, for example, a glyceride linker, an acyclic glyceride analog linker, or a cyclic linker (including a spiro linker, a bicyclic linker, and a polycyclic linker). The linker can include functional groups such as an ether, an ester, a phosphate, a phosphonate, a phosphorothioate, a sulfonate, a disulfide, an acetal, a ketal, an imine, a hydrazone, or an oxime. Other linkers and functional groups are suitable as well.

[1620] In some embodiments, an additional lipid or lipids comprises a cloaking component. As a non-limiting example, a cloaking component can include a fusion delaying component. As non-limiting examples, the cloaking component can include an ATTA-lipid conjugate or a PEG-lipid conjugate, and can simply exchange out of the lipid particle membrane over time. By the time the lipid particle is suitably distributed in the body, it has lost sufficient cloaking agent so as to be fusogenic.

[1621] In some embodiments, an additional lipid or lipids comprises a helper lipid. Non-limiting examples of helper lipids include 1,2-distearoyl-sa-glycero-3-phosphocholine (“DSPC”), 1,2-dipalmitoyl-sn-glycero-3-phosphocholine (“DPPC”), or any related phosphatidylcholine such as natural sphingomyelin (“SM”) and synthetic derivatives thereof such as 1-oleoyl-2-cholesteryl-hemisuccinoyl-sn-glycero-3-phosphocholine (“OChemsPC”). Other helper lipids include 1,2-dileoyl-sn-3-phosphoethanolamine (“DOPE”), 1,2-diphytanoyl-sn-glycero-3-phosphoethanol-amine (“ME 16:0 PE”).

[1622] In some embodiments, an additional lipid or lipids comprises a lipopeptide compound. As a non-limiting example, a lipopeptide compound includes a central peptide and having lipophilic groups attached at each terminus, and salts and uses thereof. The lipophilic groups can be derived from a naturally-occurring lipid, or can be a C(1-22)alkyl, C(6-12)cycloalkyl, C(6-12)cycloalkyl-alkyl, C(3-18)alkenyl, C(3-18)alkynyl, C(1-5)alkoxy-C(1-5)alkyl, or a sphinganine, or (2R,3R)-2-amino-1,3-octadecanediol, icosasphinganine, sphingosine, phytosphingosine, and cis-4-sphingenine.

[1623] In some embodiments, an additional lipid or lipids comprises a PEG-lipid. As a non-limiting example, a PEG-lipid includes an uncharged lipid modified with one or more hydrophilic polymers, e.g. polyethylene glycol (herein also referred to as “PEG-lipids”) to stabilize the lipid nanoparticle and to avoid aggregation. The polyethylene glycol (PEG) size can vary from approximately 1 to 5 approximately kDa. Depending on the relative amounts of these molecules in the formulation and the length of the hydrocarbon chain, the PEG-lipid can influence the pharmacokinetic characteristics, biodistribution, and efficacy of a formulation. PEG lipids having relatively short lipid hydrocarbon chains of about 14 carbons dissociate from the LNP in vivo in plasma with a half-life of less than 1 h. In contrast, a PEG lipid with a relatively long lipid hydrocarbon chain length of about 18 carbons circulates fully associated with the formulation for several days. Hence, in one embodiment, the PEG lipid comprises a lipid hydrocarbon chain of 12 to 20 carbon atoms, 14 to 18 carbon atoms, or 14 carbon atoms. Non-limiting examples of suitable PEG modified lipids include pegylated ceremide conjugates, pegylated distearoylphosphatidyl-ethanolamine (PEG-DSPE). Other compounds that can be used to stabilize lipid nanoparticles include gangliosides (GMt, GM3, etc.). As a non-limiting example, PEG lipids have a PEG size ranging from about 1 to about 2 KDa. Specific examples are methoxy-polyethyleneglycol-carbamoyl-dimyristyloxy-propylamine (PEG2000-c-DMA), and (alpha-(3′-(1,2-dimyristoyl-3-propanoxy)carboxamide-propyl]-.omega.-met-hoxy-polyoxyethylene (PEG2000-c-DOMG). In some embodiments, a PEG-lipid is polyethyleneglycol-dimyristoyl-phosphatidylethanolamine.

[1624] In some embodiments, an additional lipid or lipids comprises a hydrophobic small molecule. In a non-limiting example, a hydrophobic small molecule includes a compound with a molecular weight of about 300 to about 700 Da comprising 2 or more carbon- or heterocycles providing a rigid core structure. As a non-limiting example, a hydrophobic small molecule is selected from the group of sterols such as cholesterol or stigmasterol or a hydrophobic vitamin such as tocopherol. In a non-limiting example, a hydrophobic small molecule is cholesterol.

[1625] In some embodiments, an additional lipid or lipids comprises a neutral lipids. As a non-limiting example a neutral lipid can include any of a number of lipid species which exist either in an uncharged or neutral zwitterionic form at physiological pH. Such lipids include, for example diacylphosphatidylcholine, diacylphosphatidylethanotamine, ceramide, sphingomyelin, dihydrosphingomyelin, cephalin, and cerebrosides. The selection of neutral lipids for use in the particles described herein is generally guided by consideration of, e.g., liposome size and stability of the liposomes in the bloodstream. As a non-limiting example, a neutral lipid component is a lipid having two acyl groups, (i.e., diacylphosphatidylcholine and diacylphosphatidylethanolamine). Lipids having a variety of acyl chain groups of varying chain length and degree of saturation are available or may be isolated or synthesized by well-known techniques. In one group of embodiments, lipids contain saturated fatty acids with carbon chain lengths in the range of C₁₀ to C₂₀. In another group of embodiments, lipids with mono or diunsaturated fatty acids with carbon chain lengths in the range of C₁₀ to C₂₀ are used. Additionally, lipids having mixtures of saturated and unsaturated fatty acid chains can be used. As a non-limiting example, a neutral lipid is DOPE, DSPC, POPC, DPPC or any related phosphatidylcholine. The neutral lipids may also be composed of sphingomyelin, dihydrosphingomyeline, or phospholipids with other head groups, such as serine and inositol.

[1626] In some embodiments, an additional lipid or lipids comprises a phospholipid. As a non-limiting example, the phospholipid includes 1,2-dioleoyl-sn-glycero-3-phosphoethanolamine. Additional non-limiting examples of phospholipids include sphingomyelin, phosphatidylcholine, phosphatidylethanolamine, phosphatidylserine, phosphatidylinositol, phosphatidic acid, palmitoyloleoyl phosphatdylcholine, lysophosphatidylcholine, lysophosphatidylethanolamine, dipalmitoylphosphatidylcholine, dioleoylphosphatidylcholine, distearoylphosphatidylcholine, or dilinoleoylphosphatidylcholine. Other phosphorus-lacking compounds, such as sphingolipids, glycosphingolipid families, diacylglycerols, and beta-acyloxyacids.

[1627] In some embodiments, an additional lipid or lipids comprises a stealth lipid. In a non-limiting example, a stealth lipid comprises a hydrophilic head and lipid moiety; in various embodiments, a stealth lipid can improve in vivo potency, increase efficacy, and/or decrease toxicity. Non-limiting examples of stealth lipids are provided, for example in WO 2011/076807.

[1628] In some embodiments, an additional lipid or lipids comprises a sterol. In a non-limiting example, a sterol is a steroid alcohol, or a member of a subgroup of steroids. In a non-limiting example, a sterol can be any of those sterols conventionally used in the field of liposome, lipid vesicle or lipid particle preparation. In a non-limiting example, a sterol is cholesterol. In a non-limiting example, a sterol is a Cholesterol, Ergosterol, Hopanoid, Phytosterol, or Steroid.

[1629] In some embodiments, an additional lipid or lipids comprises a targeting lipid or other targeting component. In non-limiting examples, a targeting lipid or other targeting component targets the lipid particles using targeting moieties that are specific to a cell type or tissue. Targeting of lipid particles using a variety of targeting moieties, such as ligands, cell surface receptors, glycoproteins, vitamins e.g., riboflavin) and monoclonal antibodies, has been previously described (see, e.g., U.S. Pat. Nos. 4,957,773 and 4,603,044). The targeting moieties can comprise the entire protein or fragments thereof. Targeting mechanisms generally require that the targeting agents be positioned on the surface of the lipid particle in such a manner that the target moiety is available for interaction with the target, for example, a cell surface receptor. A variety of different targeting agents and methods are known and available in the art, including those described, e.g., in Sapra, P. and Allen, T M, Prog. Lipid Res. 42(5):439-62 (2003); and Abra, R M et al., J. Liposome Res. 12:1-3, (2002). The use of lipid particles, i.e., liposomes, with a surface coating of hydrophilic polymer chains, such as polyethylene glycol (PEG) chains, for targeting has been proposed (Allen, et al., Biochimica et Biophysica Acta 1237: 99-108 (1995); DeFrees, et al., Journal of the American Chemistry Society 118: 6101-6104 (1996); Blume, et al., Biochimica et Biophysica Acta 1149: 180-184 (1993); Klibanov, et al., Journal of Liposome Research 2: 321-334 (1992); U.S. Pat. No. 5,013,556; Zalipsky, Bioconjugate Chemistry 4: 296-299 (1993); Zalipsky, FEBS Letters 353: 71-74 (1994); Zalipsky, in Stealth Liposomes Chapter 9 (Lasic and Martin, Eds) CRC Press, Boca Raton Fla. (1995). In one approach, a ligand, such as an antibody, for targeting the lipid particle is linked to the polar head group of lipids forming the lipid particle. In another approach, the targeting ligand is attached to the distal ends of the PEG chains forming the hydrophilic polymer coating (Klibanov, et al., Journal of Liposome Research 2: 321-334 (1992); Kirpotin et al., FEBS Letters 388: 115-118 (1996)). Standard methods for coupling the target agents can be used. For example, phosphatidylethanolamine, which can be activated for attachment of target agents, or derivatized lipophilic compounds, such as lipid-derivatized bleomycin, can be used.

[1630] In various embodiments, the additional lipid or lipids comprises any lipid described herein or reported in the art. In various embodiments, the additional lipid or lipids comprises: 5-heptadecylbenzene-1,3-diol (resorcinol), cholesterol hemisuccinate (CHEMS), dipalmitoylphosphatidylcholine (DPPC), distearoylphosphatidylcholine (DSPC), phosphocholine (DOPC), dimyristoylphosphatidylcholine (DMPC), phosphatidylcholine (PLPC), phosphatidylethanolamine (PE), egg phosphatidylcholine (EPC), dilauryloylphosphatidylcholine (DLPC), dimyristoylphosphatidylcholine (DMPC), 1-myristoyl-2-palmitoyl phosphatidylcholine (MPPC), 1-palmitoyl-2-myristoyl phosphatidylcholine (PMPC), I,2-diarachidoyl-sn-glycero-3-phosphocholine (DBPC), 1-palmitoyl-2-stearoyl phosphatidylcholine (PSPC), I-stearoyl-2-palmitoyl phosphatidylcholine (SPPC), 1,2-distearoyl-sn-glycero-3-phosphocholine (DAPC), 1,2-dieicosenoyl-sn-glycero-3-phosphocholine (DEPC), palmitoyloleoyl phosphatidylcholine (POPC), lysophosphatidyl choline, dilinoleoylphosphatidylcholine distearoylphophatidylethanolamine (DSPE), dimyristoyi phosphatidylethanolamine (DMPE), dipalmitoyl phosphatidylethanolamine (DPPE), palmitoyloleoyl phosphatidylethanolamine (POPE), lysophosphatidylethanolamine or a combination thereof. In one embodiment, the neutral phospholipid is selected from the group consisting of distearoylphosphatidylcholine (DSPC) and/or dimyristoyi phosphatidyl ethanolamine (DMPE).

[1631] Included in the instant disclosure is a free form of any lipid disclosed herein, as well as a pharmaceutically acceptable salt and stereoisomer thereof. Some of the isolated specific cationic lipids exemplified herein are the protonated salts of amine cationic lipids. The encompassed pharmaceutically acceptable salts not only include the isolated salts exemplified for the specific lipids described herein, but also all the typical pharmaceutically acceptable salts of the free form of any lipid disclosed herein.

[1632] The pharmaceutically acceptable salts of the instant lipids can be synthesized from the lipids of this invention which contain a basic or acidic moiety by conventional chemical methods. Generally, the salts of the basic cationic lipids are prepared either by ion exchange chromatography or by reacting the free base with stoichiometric amounts or with an excess of the desired salt-forming inorganic or organic acid in a suitable solvent or various combinations of solvents. Similarly, the salts of the acidic compounds are formed by reactions with the appropriate inorganic or organic base.

[1633] Thus, pharmaceutically acceptable salts of the lipids of this disclosure include the conventional non-toxic salts of the lipids of this invention as formed by reacting a basic instant lipids with an inorganic or organic acid. For example, conventional non-toxic salts include those derived from inorganic acids such as hydrochloric, hydrobromic, sulfuric, sulfamic, phosphoric, nitric and the like, as well as salts prepared from organic acids such as acetic, propionic, succinic, glycolic, stearic, lactic, malic, tartaric, citric, ascorbic, pamoic, maleic, hydroxymaleic, phenylacetic, glutamic, benzoic, salicylic, sulfanilic, 2-acetoxy-benzoic, fumaric, toluenesulfonic, methanesulfonic, ethane disulfonic, oxalic, isethionic, trifluoroacetic (TFA) and the like.

[1634] When the lipids of the present disclosure are acidic, suitable “pharmaceutically acceptable salts” refers to salts prepared form pharmaceutically acceptable non-toxic bases including inorganic bases and organic bases. Salts derived from inorganic bases include aluminum, ammonium, calcium, copper, ferric, ferrous, lithium, magnesium, manganic salts, manganous, potassium, sodium, zinc and the like. Non-limiting examples include ammonium, calcium, magnesium, potassium and sodium salts. Salts derived from pharmaceutically acceptable organic non-toxic bases include salts of primary, secondary and tertiary amines, substituted amines including naturally occurring substituted amines, cyclic amines and basic ion exchange resins, such as arginine, betaine caffeine, choline, N,N¹-dibenzylethylenediamine, diethylamin, 2-diethylaminoethanol, 2-dimethylaminoethanol, ethanolamine, ethylenediamine, N-ethylmorpholine, N-ethylpiperidine, glucamine, glucosamine, histidine, hydrabamine, isopropylamine, lysine, methyl glucamine, morpholine, piperazine, piperidine, polyamine resins, procaine, purines, theobromine, triethylamine, trimethylamine tripropylamine, tromethamine and the like.

### Targeting Compound or Moiety

[1635] In some embodiments, the present disclosure pertains to compositions and methods related to a composition comprising: a biologically active agent; a lipid comprising a C₁₀-C₄₀ linear, saturated or partially unsaturated, aliphatic chain; and a targeting compound or moiety (targeting component). In some embodiments, the present disclosure pertains to compositions and methods related to a composition comprising: a biologically active agent; a lipid comprising a C₁₀-C₄₀ linear, saturated or partially unsaturated, aliphatic chain, optionally substituted with one or more C₁₋₄ aliphatic group; and a targeting compound or moiety.

[1636] In various embodiments, the composition for delivery of a biologically active agent comprises a biologically active agent; a lipid selected from: lauric acid, myristic acid, palmitic acid, stearic acid, oleic acid, linoleic acid, alpha-linolenic acid, gamma-linolenic acid, docosahexaenoic acid (cis-DHA), turbinaric acid and dilinoleyl; and a targeting compound or moiety.

[1637] In various embodiments, the targeting compound or moiety is selected from: an antibody, a sugar, an antigen, a small molecule, a peptide, and a cell penetrating peptide (CPP).

[1638] In some embodiments, a targeting compound or moiety is a structure capable of targeting a compound or composition to a particular cell or tissue or subset of cells or tissues. In some embodiments, a targeting moiety is designed to take advantage of cell- or tissue-specific expression of particular targets, receptors, proteins, or other subcellular components; In some embodiments, a targeting moiety is a ligand (e.g., a small molecule, antibody, peptide, protein, carbohydrate, aptamer, etc.) that targets a compound or a composition to a cell or tissue, and/or binds to a target, receptor, protein, or other subcellular component. In some embodiments, a targeting moiety targets a composition comprising a lipid and a biologically active agent to a muscle cell or tissue. In some embodiments, a targeting moiety comprises a compound that targets a muscle cell or tissue. In some embodiments, a targeting moiety comprises fetuin, epidermal growth factor, fibroblast growth factor, insulin, and/or dexamethasone, or a component or fragment or combination thereof. In some embodiments, a targeting moiety targets a composition comprising a lipid and a biologically active agent to a neuron or other cell or tissue in the neuromuscular system. In some embodiments, a targeting moiety comprises a rabies virus peptide (see Kumar et al. 2007 Nature 448: 39-43; and Hwang do et al. 2011 Biomaterials 32: 4968-4975). In some embodiments, a targeting moiety is a moiety capable of binding to a neurotransmitter transporter, a dopamine transporter, a serotonin transporter, or norepinephrine transporter, or alpha-synuclein, or a mRNA encoding any of these components (see U.S. Pat. No. 9,084,825). In some embodiments, a targeting moiety is a transferrin receptor ligand or alpha-transferrin antibody, thus reportedly making use of a transferrin receptor-mediated route across the vascular endothelium. Clark et al. 2015 Proc. Natl. Acad. Sci. USA 112: 12486-12491; Bien-Ly et al. 2014 J. Exp. Med. 211: 233-244; and Youn et al. 2014 Mol. Pharm. 11: 486-495. In some embodiments, a targeting moiety binds to an integrin. In some embodiments, a targeting moiety binds to alphallbeta3, e.g., on platelets. In some embodiments, a targeting moiety binds to a beta2 integrin, e.g., on a leukocyte. In some embodiments, a targeting moiety binds to an alphavbeta3, e.g., on a tumor cell. In some embodiments, a targeting moiety binds to a GPCR (G protein-coupled receptor) (see Hanyaloglu et al. 2008 Ann. Rev. Pharm. Tox. 48: 537-568). In some embodiments, a targeting moiety binds to a gastrin releasing peptide receptor, e.g., on a cancer cell (see Cornelio et al. 2007 Ann. Oncol. 18: 1457-1466). In some embodiments, a targeting moiety comprises a carbonic anhydrase inhibitor.

[1639] Antibody-targeted liposomes can be constructed using, for instance, liposomes that incorporate protein A (see, Renneisen, et al., J. Bio. Chem., 265:16337-16342 (1990) and Leonetti, et. al., Proc. Natl. Acad. Sci. (USA), 87:2448-2451 (1990). Other examples of antibody conjugation are disclosed in U.S. Pat. No. 6,027,726. Examples of targeting moieties can also include other proteins, specific to cellular components, including antigens associated with neoplasms or tumors. Proteins used as targeting moieties can be attached to the liposomes via covalent bonds (see, Heath, Covalent Attachment of Proteins to Liposomes, 149 Methods in Enzymology 111-119 (Academic Press, Inc. 1987)). Other targeting methods include the biotin-avidin system.

[1640] In various embodiments, the targeting compound or moiety increases the targeting of the composition comprising a biologically active agent to a particular cell or tissue. For example, it is reported that particular cells or tissues in the body comprise particular receptors or other structures which allow the selective uptake or particular compounds. For example, muscle cells reportedly readily uptake sugars. Thus, as a non-limiting example, if delivery to a muscle cell or tissue is desired, the composition for delivery of a biologically active agent can comprise a biologically active agent; a lipid selected from: lauric acid, myristic acid, palmitic acid, stearic acid, oleic acid, linoleic acid, alpha-linolenic acid, gamma-linolenic acid, docosahexaenoic acid (cis-DHA), turbinaric acid and dilinoleyl; and a targeting compound or moiety, wherein the targeting compound or moiety targets a muscle cell or tissue. Such a targeting compound or moiety can comprise, as a non-limiting example, a sugar, e.g., a glucosamine (e.g., a trinary glucosamine or mono glucosamine) or mannose (e.g., a mono mannose). In various embodiments of the composition, the lipid and/or the targeting compound or moiety is conjugated to the biologically active agent. As a non-limiting example, if the biologically active agent is a nucleic acid, the nucleic acid can comprise a lipid and a targeting compound or moiety, e.g., a sugar. As a non-limiting example, if the biologically active agent is a nucleic acid, the nucleic acid can be conjugated to a lipid and/or targeting compound or moiety, e.g., a sugar. As a non-limiting example, if the biologically active agent is a nucleic acid, the nucleic acid can be conjugated on one end (e.g., the 5′ or 3′ end) to a lipid, and conjugated at the other end (e.g., the other of the 5′ or 3′ end) to a targeting compound or moiety, e.g., a sugar, e.g., a glucosamine (e.g., a trinary or mono glucosamine) or mannose (e.g., a mono mannose). In some embodiments, a targeting compound or moiety or component comprises a carbonic anhydrase inhibitor.

Optional 5′ and 3′ End Modifications for Biologically Active Agents which are Nucleic Acids

[1641] In some embodiments, the present disclosure pertains to a composition comprising a lipid and a biologically active agent, wherein the biologically active agent comprises or consists of a nucleic acid (e.g., an oligonucleotide). In some embodiments, a nucleic acid can further comprise a 5′ end or 3′ end cap (also referenced as a “modification”), which is non-nucleotidic. By describing a 5′ end cap or 3′ end cap as “non-nucleotidic”, it is meant that a nucleotide comprises three components: a phosphate, a pentose (e.g., a ribose or deoxyribose) and a nucleobase, and a 3′ end cap does not comprise all three of the components.

[1642] The 5′ end cap can be selected, as non-limiting examples, from any of: a composition comprising GalNAc; a nucleotide lacking a 5′ phosphate or 5′-OH; a nucleotide lacking a 5′ phosphate or a 5′-OH and also comprising a 2-OMe or 2′-MOE modification; 5′-deoxy-2′-O-methyl modification; 5′-OME-dT; ddT; and 5′-OTr-dT. Any 5′ end cap known in the art can be used on a CpG oligonucleotide.

[1643] The 3′ end cap can be selected, as non-limiting examples, from any of: C3, C6, C8, C10, C12, lithocholic acid, biphenyl, triethylene glycol, cyclohexyl, phenyl, adamantane, C3 amino, C7 amino, X027, X038, X050 to 52, X058 to 69, X097 to 98, X109 to 113, X1009 to 1028, and X1047 to 1049. See, for example, U.S. Pat. Nos. 8,084,600; 8,404,832; 8,404,831; 8,957,041; and WO 2015051366.

[1644] Any 3′ end cap known in the art can be used on a CpG oligonucleotide.

[1645] Any 5′ end cap can be used in combination with any 3′ end cap.

[1646] In various embodiments, the present disclosure pertains to a composition comprising a lipid and a biologically active agent, wherein the biologically active agent is a nucleic acid, and the nucleic acid comprises a 5′ end cap; a 3′ end cap; a 5′ end cap and a 3′ end cap; or neither a 5′ nor a 3′ end cap.

### Methods of Making a Composition Comprising a Lipid and a Biologically Active Agent

[1647] In some embodiments, the present disclosure pertains to compositions and methods related to a composition comprising a biologically active agent and a lipid comprising a C₁₀-C₄₀ linear, saturated or partially unsaturated, aliphatic chain, wherein the lipid is conjugated to the biologically active agent. In some embodiments, the present disclosure pertains to compositions and methods related to a composition comprising a biologically active agent and a lipid comprising a C₁₀-C₄₀ linear, saturated or partially unsaturated, aliphatic chain, optionally substituted with one or more C₁₋₄ aliphatic group, wherein the lipid is conjugated to the biologically active agent.

[1648] In some embodiments, the present disclosure pertains to compositions and methods related to a composition comprising a biologically active agent and a lipid comprising a C₁₀-C₄₀ linear, saturated or partially unsaturated, aliphatic chain, wherein the lipid is not conjugated to the biologically active agent. In some embodiments, the present disclosure pertains to compositions and methods related to a composition comprising a biologically active agent and a lipid comprising a C₁₀-C₄₀ linear, saturated or partially unsaturated, aliphatic chain, optionally substituted with one or more C₁₋₄ aliphatic group, wherein the lipid is not conjugated to the biologically active agent.

[1649] In some embodiments, a composition comprises a biologically active agent and a lipid selected from: lauric acid, myristic acid, palmitic acid, stearic acid, oleic acid, linoleic acid, alpha-linolenic acid, gamma-linolenic acid, docosahexaenoic acid (cis-DHA), turbinaric acid and dilinoleyl, wherein the lipid is not conjugated to the biologically active agent.

[1650] In some embodiments, a composition comprises a biologically active agent and a lipid selected from: lauric acid, myristic acid, palmitic acid, stearic acid, oleic acid, linoleic acid, alpha-linolenic acid, gamma-linolenic acid, docosahexaenoic acid (cis-DHA), turbinaric acid and dilinoleyl, wherein the lipid is conjugated to the biologically active agent.

[1651] In some embodiments, a composition comprises a biologically active agent and a lipid selected from: lauric acid, myristic acid, palmitic acid, stearic acid, oleic acid, linoleic acid, alpha-linolenic acid, gamma-linolenic acid, docosahexaenoic acid (cis-DHA), turbinaric acid and dilinoleyl, wherein the lipid is directly conjugated to the biologically active agent (without a linker interposed between the lipid and the biologically active agent).

[1652] In some embodiments, a composition comprises a biologically active agent and a lipid selected from: lauric acid, myristic acid, palmitic acid, stearic acid, oleic acid, linoleic acid, alpha-linolenic acid, gamma-linolenic acid, docosahexaenoic acid (cis-DHA), turbinaric acid and dilinoleyl, wherein the lipid is indirectly conjugated to the biologically active agent (with a linker interposed between the lipid and the biologically active agent).

[1653] Various methods of making compositions comprising lipids are known in the art.

[1654] Various methods of conjugating a lipid to various molecules are known in the art.

[1655] A non-limiting example of a method for conjugating a lipid to an oligonucleotide is provided in Example 2. Similar methods can be used to conjugate stereorandom and stereopure oligonucleotides to various lipids.

[1656] Any appropriate method known in the art can be used to produce a composition comprising a lipid and a biologically active agent as described herein.

### Linkers

[1657] In some embodiments, the present disclosure pertains to compositions and methods related to a composition comprising a biologically active agent and a lipid comprising a C₁₀-C₄₀ linear, saturated or partially unsaturated, aliphatic chain, wherein the lipid is conjugated to the biologically active agent. In some embodiments, the present disclosure pertains to compositions and methods related to a composition comprising a biologically active agent and a lipid comprising a C₁₀-C₄₀ linear, saturated or partially unsaturated, aliphatic chain, optionally substituted with one or more C₁₋₄ aliphatic group, wherein the lipid is conjugated to the biologically active agent.

[1658] In some embodiments, the present disclosure pertains to compositions and methods related to a composition comprising a biologically active agent and a lipid comprising a C₁₀-C₄₀ linear, saturated or partially unsaturated, aliphatic chain, wherein the lipid is not conjugated to the biologically active agent. In some embodiments, the present disclosure pertains to compositions and methods related to a composition comprising a biologically active agent and a lipid comprising a C₁₀-C₄₀ linear, saturated or partially unsaturated, aliphatic chain, optionally substituted with one or more C₁₋₄ aliphatic group, wherein the lipid is not conjugated to the biologically active agent.

[1659] In some embodiments, a composition comprises a biologically active agent and a lipid selected from: lauric acid, myristic acid, palmitic acid, stearic acid, oleic acid, linoleic acid, alpha-linolenic acid, gamma-linolenic acid, docosahexaenoic acid (cis-DHA), turbinaric acid and dilinoleyl, wherein the lipid is not conjugated to the biologically active agent.

[1660] In some embodiments, a composition comprises a biologically active agent and a lipid selected from: lauric acid, myristic acid, palmitic acid, stearic acid, oleic acid, linoleic acid, alpha-linolenic acid, gamma-linolenic acid, docosahexaenoic acid (cis-DHA), turbinaric acid and dilinoleyl, wherein the lipid is conjugated to the biologically active agent.

[1661] In some embodiments, a composition comprises a biologically active agent and a lipid selected from: lauric acid, myristic acid, palmitic acid, stearic acid, oleic acid, linoleic acid, alpha-linolenic acid, gamma-linolenic acid, docosahexaenoic acid (cis-DHA), turbinaric acid and dilinoleyl, wherein the lipid is directly conjugated to the biologically active agent (without a linker interposed between the lipid and the biologically active agent).

[1662] In some embodiments, a composition comprises a biologically active agent and a lipid selected from: lauric acid, myristic acid, palmitic acid, stearic acid, oleic acid, linoleic acid, alpha-linolenic acid, gamma-linolenic acid, docosahexaenoic acid (cis-DHA), turbinaric acid and dilinoleyl, wherein the lipid is indirectly conjugated to the biologically active agent (with a linker interposed between the lipid and the biologically active agent).

[1663] A linker is a moiety that connects two parts of a composition; as a non-limiting example, a linker physically connects a biologically active agent to a lipid. In some embodiments, a linker is -L^{LD}-.

[1664] Non-limiting examples of suitable linkers include: an uncharged linker; a charged linker; a linker comprising an alkyl; a linker comprising a phosphate; a branched linker; an unbranched linker; a linker comprising at least one cleavage group; a linker comprising at least one redox cleavage group; a linker comprising at least one phosphate-based cleavage group; a linker comprising at least one acid-cleavage group; a linker comprising at least one ester-based cleavage group; a linker comprising at least one peptide-based cleavage group.

[1665] In some embodiments, a linker comprises an uncharged linker or a charged linker.

[1666] In some embodiments, a linker comprises an alkyl.

[1667] In some embodiments, a linker comprises a phosphate. In various embodiments, a phosphate can also be modified by replacement of a bridging oxygen, (i.e. oxygen that links the phosphate to the nucleoside), with nitrogen (bridged phosphoroamidates), sulfur (bridged phosphorothioates) and carbon (bridged methylenephosphonates). The replacement can occur at the either linking oxygen or at both the linking oxygens. In some embodiments, the bridging oxygen is the 3′-oxygen of a nucleoside, replacement with carbon is done. In some embodiments, the bridging oxygen is the 5′-oxygen of a nucleoside, replacement with nitrogen is done. In various embodiments, the linker comprising a phosphate comprises any one or more of: a phosphorodithioate, phosphoramidate, boranophosphonoate, or a compound of formula (I):

[chemical structure]

where R³ is selected from OH, SH, NH₂, BH₃, CH₃, C₁₋₆ alkyl, C₆₋₁₀ aryl, C₁₋₆ alkoxy and C₆₋₁₀ aryl-oxy, wherein C₁₋₆ alkyl and C₆₋₁₀ aryl are unsubstituted or optionally independently substituted with 1 to 3 groups independently selected from halo, hydroxyl and NH₂; and R⁴ is selected from O, S, NH, or CH₂.

[1668] In some embodiments, a linker comprises a direct bond or an atom such as oxygen or sulfur, a unit such as NR¹, C(O), C(O)NH, SO, SO₂, SO₂NH or a chain of atoms, such as substituted or unsubstituted alkyl, substituted or unsubstituted alkenyl, substituted or unsubstituted alkynyl, arylalkyl, arylalkenyl, arylalkynyl, heteroarylalkyl, heteroarylalkenyl, heteroarylalkynyl, heterocyclylalkyl, heterocyclylalkenyl, heterocyclylalkynyl, aryl, heteroaryl, heterocyclyl, cycloalkyl, cycloalkenyl, alkylarylalkyl, alkylarylalkenyl, alkylarylalkynyl, alkenylarylalkyl, alkenylarylalkenyl, alkenylarylalkynyl, alkynylarylalkyl, alkynylarylalkenyl, alkynylarylalkynyl, alkylheteroarylalkyl, alkylheteroarylalkenyl, alkylheteroarylalkynyl, alkenylheteroarylalkyl, alkenylheteroarylalkenyl, alkenylheteroarylalkynyl, alkynylheteroarylalkyl, alkynylheteroarylalkenyl, alkynylheteroarylalkynyl, alkylheterocyclylalkyl, alkylheterocyclylalkenyl, alkylhererocyclylalkynyl, alkenylheterocyclylalkyl, alkenylheterocyclylalkenyl, alkenylheterocyclylalkynyl, alkynylheterocyclylalkyl, alkynylheterocyclylalkenyl, alkynylheterocyclylalkynyl, alkylaryl, alkenylaryl, alkynylaryl, alkylheteroaryl, alkenylheteroaryl, alkynylhereroaryl, where one or more methylenes can be interrupted or terminated by O, S, S(O), SO₂, N(R₁)₂, C(O), cleavable linking group, substituted or unsubstituted aryl, substituted or unsubstituted heteroaryl, substituted or unsubstituted heterocyclic; where R¹ is hydrogen, acyl, aliphatic or substituted aliphatic.

[1669] In some embodiments, a linker is a branched linker. In some embodiments, a branchpoint of the branched linker may be at least trivalent, but may be a tetravalent, pentavalent or hexavalent atom, or a group presenting such multiple valencies. In some embodiments, a branchpoint is —N, —N(Q)-C, —O—C, —S—C, —SS—C, —C(O)N(Q)-C, —OC(O)N(Q)-C, —N(Q)C(O)—C, or —N(Q)C(O)O—C; wherein Q is independently for each occurrence H or optionally substituted alkyl. In other embodiment, the branchpoint is glycerol or glycerol derivative.

[1670] In one embodiment, a linker comprises at least one cleavable linking group.

[1671] As a non-limiting example, a cleavable linking group can be sufficiently stable outside the cell, but which upon entry into a target cell is cleaved to release the two parts the linker is holding together. As a non-limiting example, a cleavable linking group is cleaved at least 10 times or more, at least 100 times faster in the target cell or under a first reference condition (which can, e.g., be selected to mimic or represent intracellular conditions) than in the blood of a subject, or under a second reference condition (which can, e.g., be selected to mimic or represent conditions found in the blood or serum). Cleavable linking groups are susceptible to cleavage agents, e.g., pH, redox potential or the presence of degradative molecules. Generally, cleavage agents are more prevalent or found at higher levels or activities inside cells than in serum or blood. Examples of such degradative agents include: redox agents which are selected for particular substrates or which have no substrate specificity, including, e.g., oxidative or reductive enzymes or reductive agents such as mercaptans, present in cells, that can degrade a redox cleavable linking group by reduction; esterases; endosomes or agents that can create an acidic environment, e.g., those that result in a pH of five or lower; enzymes that can hydrolyze or degrade an acid cleavable linking group by acting as a general acid, peptidases (which can be substrate specific), and phosphatases.

[1672] As a non-limiting example, a cleavable linkage group, such as a disulfide bond can be susceptible to pH. The pH of human serum is 7.4, while the average intracellular pH is slightly lower, ranging from about 7.1-7.3. Endosomes have a more acidic pH, in the range of 5.5-6.0, and lysosomes have an even more acidic pH at around 5.0. Some linkers will have a cleavable linking group that is cleaved at a desired pH, thereby releasing the cationic lipid from the ligand inside the cell, or into the desired compartment of the cell.

[1673] As a non-limiting example, a linker can include a cleavable linking group that is cleavable by a particular enzyme. The type of cleavable linking group incorporated into a linker can depend on the cell to be targeted. For example, liver targeting ligands can be linked to the cationic lipids through a linker that includes an ester group. Liver cells are rich in esterases, and therefore the linker will be cleaved more efficiently in liver cells than in cell types that are not esterase-rich. Other cell-types rich in esterases include cells of the lung, renal cortex, and testis.

[1674] As a non-limiting example, a linker can contain a peptide bond, which can be used when targeting cell types rich in peptidases, such as liver cells and synoviocytes.

[1675] As a non-limiting example, suitability of a candidate cleavable linking group can be evaluated by testing the ability of a degradative agent (or condition) to cleave the candidate linking group. It will also be desirable to also test the candidate cleavable linking group for the ability to resist cleavage in the blood or when in contact with other non-target tissue. Thus one can determine the relative susceptibility to cleavage between a first and a second condition, where the first is selected to be indicative of cleavage in a target cell and the second is selected to be indicative of cleavage in other tissues or biological fluids, e.g., blood or serum. The evaluations can be carried out in cell free systems, in cells, in cell culture, in organ or tissue culture, or in whole animals. It may be useful to make initial evaluations in cell-free or culture conditions and to confirm by further evaluations in whole animals. As a non-limiting example, useful candidate compounds are cleaved at least 2, 4, 10 or 100 times faster in the cell (or under in vitro conditions selected to mimic intracellular conditions) as compared to blood or serum (or under in vitro conditions selected to mimic extracellular conditions).

[1676] In some embodiments, a linker comprises a redox cleavable linking group. As a non-limiting example, one class of cleavable linking groups are redox cleavable linking groups that are cleaved upon reduction or oxidation. A non-limiting example of reductively cleavable linking group is a disulphide linking group (—S—S—). To determine if a candidate cleavable linking group is a suitable “reductively cleavable linking group,” or for example is suitable for use with a particular oligonucleotide moiety and particular targeting agent one can look to methods described herein. As a non-limiting example, a candidate can be evaluated by incubation with dithiothreitol (DTT), or other reducing agent using reagents know in the art, which mimic the rate of cleavage which would be observed in a cell, e.g., a target cell. The candidates can also be evaluated under conditions which are selected to mimic blood or serum conditions. As a non-limiting example, candidate compounds are cleaved by at most 10% in the blood. As a non-limiting example, useful candidate compounds are degraded at least 2, 4, 10 or 100 times faster in the cell (or under in vitro conditions selected to mimic intracellular conditions) as compared to blood (or under in vitro conditions selected to mimic extracellular conditions). The rate of cleavage of candidate compounds can be determined using standard enzyme kinetics assays under conditions chosen to mimic intracellular media and compared to conditions chosen to mimic extracellular media.

[1677] In some embodiments, a linker comprises a phosphate-based cleavable linking groups are cleaved by agents that degrade or hydrolyze the phosphate group. An example of an agent that cleaves phosphate groups in cells are enzymes such as phosphatases in cells. Examples of phosphate-based linking groups are —O—P(O)(ORk)-O—, —O—P(S)(ORk)-O—, —O—P(S)(SRk)-O—, —S—P(O)(ORk)-O—, —O—P(O)(ORk)-S—, —S—P(O)(ORk)-S—, —O—P(S)(ORk)-S—, —S—P(S)(ORk)-O—, —O—P(O)(Rk)-O—, —O—P(S)(Rk)-O—, —S—P(O)(Rk)-O—, —S—P(S)(Rk)-O—, —S—P(O)(Rk)-S—, —O—P(S)(Rk)-S—. Additional non-limiting examples are —O—P(O)(OH)—O—, —O—P(S)(OH)—O—, —O—P(S)(SH)—O—, —S—P(O)(OH)—O—, —O—P(O)(OH)—S—, —S—P(O)(OH)—S—, —O—P(S)(OH)—S—, —S—P(S)(OH)—O—, —O—P(O)(H)—O—, —O—P(S)(H)—O—, —S—P(O)(H)—O—, —S—P(S)(H)—O—, -S—P(O)(H)— S—, —O—P(S)(H)—S—. An additional non-limiting examples is —O—P(O)(OH)—O—. In various embodiments, Rk is any of: OH, SH, NH₂, BH₃, CH₃, C₁₋₆ alkyl, C₆₋₁₀ aryl, C₁₋₆ alkoxy and C₆₋₁₀ aryl-oxy, wherein C₁₋₆ alkyl and C₆₋₁₀ aryl are unsubstituted or optionally independently substituted with 1 to 3 groups independently selected from halo, hydroxyl and NH₂; and R⁴ is selected from O, S, NH, or CH₂.

[1678] In some embodiments, a linker comprises an acid cleavable linking groups are linking groups that are cleaved under acidic conditions. As a non-limiting example, acid cleavable linking groups are cleaved in an acidic environment with a pH of about 6.5 or lower (e.g., about 6.0, 5.5, 5.0, or lower), or by agents such as enzymes that can act as a general acid. In a cell, specific low pH organelles, such as endosomes and lysosomes can provide a cleaving environment for acid cleavable linking groups. Examples of acid cleavable linking groups include but are not limited to hydrazones, esters, and esters of amino acids. Acid cleavable groups can have the general formula —C═NN—, C(O)O, or —OC(O). In an additional non-limiting example, when the carbon attached to the oxygen of the ester (the alkoxy group) is an aryl group, substituted alkyl group, or tertiary alkyl group such as dimethyl pentyl or t-butyl.

[1679] In some embodiments, a linker comprises an ester-based linking groups. As a non-limiting example, ester-based cleavable linking groups are cleaved by enzymes such as esterases and amidases in cells. Examples of ester-based cleavable linking groups include but are not limited to esters of alkylene, alkenylene and alkynylene groups. Ester cleavable linking groups have the general formula —C(O)O—, or —OC(O)—. These candidates can be evaluated using methods analogous to those described above.

[1680] In some embodiments, a linker comprises a peptide-based cleaving group.

[1681] Peptide-based cleavable linking groups are cleaved by enzymes such as peptidases and proteases in cells. Peptide-based cleavable linking groups are peptide bonds formed between amino acids to yield oligopeptides (e.g., dipeptides, tripeptides etc.) and polypeptides. As a non-limiting example, peptide-based cleavable groups do not include the amide group (—C(O)NH—). The amide group can be formed between any alkylene, alkenylene or alkynylene. A peptide bond is a special type of amide bond formed between amino acids to yield peptides and proteins. As a non-limiting example, a peptide based cleavage group can be limited to the peptide bond (i.e., the amide bond) formed between amino acids yielding peptides and proteins and does not include the entire amide functional group. As a non-limiting example, a peptide-based cleavable linking groups can have the general formula —NHCHR^{A}C(O)NHCHR^{B}C(O)—, where R^{A} and R^{B} are the R groups of the two adjacent amino acids. These candidates can be evaluated using methods analogous to those described above.

[1682] Any linker reported in the art can be used, including, as non-limiting examples, those described in: U.S. Pat. App. No. 20150265708.

[1683] In some embodiments, a lipid is conjugated to a biologically active agent using any method known in the art in accordance with the present disclosure.

[1684] Non-limiting examples of procedures for conjugating a lipid to a biologically active agent are provided in the Examples. For example, a lipid (e.g., stearic acid or turbinaric acid) can be conjugated to an oligonucleotide (e.g., WV-3473) using a C6 PO linker to produced WV-3545, 5′-Mod015L001 fU*fC*fA*fA*fG*fG*mAfA*mGmA*fU*mGmGfC*fA*fU*fU*fU*fC*fU-3′ (SEQ ID NO: 2419), wherein Mod015L001 is based on stearic acid and C6 PO linker; and WV-3546, 5′-Mod020L001 fU*fC*fA*fA*fG*fG*mAfA*mGmA*fU*mGmGfC*fA*fU*fU*fU*fC*fU-3′ (SEQ ID NO: 2420), wherein Mod020L001 is based on turbinaric acid and C6 PO linker; WV-3856, 5′-Mod015L001 fU*fC*fA*fA*fG*fG*mAfA*mGfA*mUfG*mGfC*fA*fU*fU*fU*fC*fU-3′ (SEQ ID NO: 2421), wherein Mod015L001 is based on stearic acid and C6 PO linker; and WV-3559, 5′-Mod020L001 fU*fC*fA*fA*fG*fG*mAfA*mGfA*mUfG*mGfC*fA*fU*fU*fU*fC*fU-3′ (SEQ ID NO: 2422), wherein Mod020L001 is based on turbinaric acid and C6 PO linker. These oligonucleotides were efficacious in various in vitro assays.

### Pharmaceutical Preparations

[1685] A pharmaceutical composition can comprise a lipid and a biologically active agent.

[1686] In various embodiments, the present disclosure pertains to a composition or pharmaceutical composition comprising a lipid and a biologically active agent and a pharmaceutically acceptable carrier.

[1687] In some embodiments, pharmaceutical compositions may be specially formulated for administration in solid or liquid form, including those adapted for the following: oral administration, for example, drenches (aqueous or non-aqueous solutions or suspensions), tablets, e.g., those targeted for buccal, sublingual, and systemic absorption, boluses, powders, granules, pastes for application to the tongue; parenteral administration, for example, by subcutaneous, intramuscular, intravenous or epidural injection as, for example, a sterile solution or suspension, or sustained-release formulation; topical application, for example, as a cream, ointment, or a controlled-release patch or spray applied to the skin, lungs, or oral cavity; intravaginally or intrarectally, for example, as a pessary, cream, or foam; sublingually; ocularly; transdermally; or nasally, pulmonary, and to other mucosal surfaces. A pharmaceutical composition comprising a lipid and a biologically active agent can be delivered by intravenous infusion, subcutaneous injection, intramuscular injection, intranasal, intrathecal, topical, mucosal delivery, vaginal delivery, oral delivery, intrarectal delivery, conjunctival delivery, intraocular delivery, transcutaneous delivery, or any other modality known in the art.

[1688] This pharmaceutical composition can further comprise any component appropriate for delivery of a composition comprising a lipid and a biologically active agent. Such components include, as non-limiting examples, a pharmaceutically acceptable salt, a pharmaceutically accept carrier.

[1689] Pharmaceutically acceptable salts are well known in the art. For example, S. M. Berge, et al. describes pharmaceutically acceptable salts in detail in J. Pharmaceutical Sciences, 66: 1-19 (1977). In some embodiments, pharmaceutically acceptable salt include, but are not limited to, nontoxic acid addition salts, which are salts of an amino group formed with inorganic acids such as hydrochloric acid, hydrobromic acid, phosphoric acid, sulfuric acid and perchloric acid or with organic acids such as acetic acid, maleic acid, tartaric acid, citric acid, succinic acid or malonic acid or by using other methods used in the art such as ion exchange. In some embodiments, pharmaceutically acceptable salts include, but are not limited to, adipate, alginate, ascorbate, aspartate, benzenesulfonate, benzoate, bisulfate, borate, butyrate, camphorate, camphorsulfonate, citrate, cyclopentanepropionate, digluconate, dodecylsulfate, ethanesulfonate, formate, fumarate, glucoheptonate, glycerophosphate, gluconate, hemisulfate, heptanoate, hexanoate, hydroiodide, 2-hydroxy-ethanesulfonate, lactobionate, lactate, laurate, lauryl sulfate, malate, maleate, malonate, methanesulfonate, 2-naphthalenesulfonate, nicotinate, nitrate, oleate, oxalate, palmitate, pamoate, pectinate, persulfate, 3-phenylpropionate, phosphate, picrate, pivalate, propionate, stearate, succinate, sulfate, tartrate, thiocyanate, p-toluenesulfonate, undecanoate, valerate salts, and the like. Representative alkali or alkaline earth metal salts include sodium, lithium, potassium, calcium, magnesium, and the like. In some embodiments, pharmaceutically acceptable salts include, when appropriate, nontoxic ammonium, quaternary ammonium, and amine cations formed using counterions such as halide, hydroxide, carboxylate, sulfate, phosphate, nitrate, alkyl having from 1 to 6 carbon atoms, sulfonate and aryl sulfonate.

[1690] Pharmaceutically acceptable carriers are well known in the art. For example, acceptable carriers (e.g., pharmaceutically acceptable carriers), diluents, stabilizers, buffers, preservatives, etc., may be included as described infra.

[1691] As used herein, the term “pharmaceutically acceptable carrier” means a pharmaceutically-acceptable material, composition or vehicle, such as a liquid or solid filler, diluent, excipient, or solvent encapsulating material, involved in carrying or transporting the subject compound from one organ, or portion of the body, to another organ, or portion of the body. Each carrier must be “acceptable” in the sense of being compatible with the other ingredients of the formulation and not injurious to the patient. Some examples of materials which can serve as pharmaceutically-acceptable carriers include: sugars, such as lactose, glucose and sucrose; starches, such as corn starch and potato starch; cellulose, and its derivatives, such as sodium carboxymethyl cellulose, ethyl cellulose and cellulose acetate; powdered tragacanth; malt; gelatin; talc; excipients, such as cocoa butter and suppository waxes; oils, such as peanut oil, cottonseed oil, safflower oil, sesame oil, olive oil, corn oil and soybean oil; glycols, such as propylene glycol; polyols, such as glycerin, sorbitol, mannitol and polyethylene glycol; esters, such as ethyl oleate and ethyl laurate; agar; buffering agents, such as magnesium hydroxide and aluminum hydroxide; alginic acid; pyrogen-free water; isotonic saline; Ringer's solution; ethyl alcohol; pH buffered solutions; polyesters, polycarbonates and/or polyanhydrides; and other non-toxic compatible substances employed in pharmaceutical formulations.

[1692] Pharmaceutically acceptable carriers or excipients that can be used in the manufacture of a pharmaceutical composition include, but are not limited to: binding agents, buffering agents, disintegrating agents, dispersing and/or granulating agents, inert diluents, lubricating agents, oils, preservatives, surface active agents and/or emulsifiers. Such excipients may optionally be included in pharmaceutical compositions.

[1693] Non-limiting example diluents include, but are not limited to: calcium carbonate, calcium hydrogen phosphate, calcium phosphate, calcium sulfate, cellulose, cornstarch, dicalcium phosphate, dry starch, inositol, kaolin, mannitol, microcrystalline cellulose, powdered sugar, sodium carbonate, sodium chloride, sodium phosphate lactose, sorbitol, sucrose, and/or combinations thereof.

[1694] Non-limiting example granulating and/or dispersing agents include, but are not limited to: agar, alginic acid, bentonite, calcium carbonate, calcium carboxymethyl cellulose, carboxymethyl cellulose, cation-exchange resins, cellulose and wood products, citrus pulp, clays, corn starch, cross-linked poly(vinyl-pyrrolidone) (crospovidone), cross-linked sodium carboxymethyl cellulose (e.g., croscarmellose), guar gum, magnesium aluminum silicate (e.g., VEEGUM®), methylcellulose, microcrystalline starch, natural sponge, potato starch, pregelatinized starch (e.g., starch 1500), quaternary ammonium compounds, silicates, sodium carbonate, sodium carboxymethyl starch (sodium starch glycolate), sodium lauryl sulfate, sodium starch glycolate, tapioca starch, water insoluble starch, and/or combinations thereof.

[1695] Non-limiting example surface active agents and/or emulsifiers include, but are not limited to: polyoxyethylene lauryl ether [BRIJ® 30], acacia, acrylic acid polymer, agar, alginic acid, and carboxyvinyl polymer, and propylene glycol monostearate, and SOLUTOL®), benzalkonium chloride, carbomers, carboxy polymethylene, carboxymethylcellulose sodium, carrageenan, casein, cellulosic derivatives, cetrimonium bromide, cetyl alcohol, cetylpyridinium chloride, cholesterol, cholesterol, chondrux, colloidal clays (e.g. bentonite[aluminum silicate] and VEEGUM® [magnesium aluminum silicate]), diethylene glycol monolaurate, docusate sodium, egg yolk, ethyl laurate, ethyl oleate, ethylene glycol distearate, gelatin, glyceryl monooleate, glyceryl monostearate, high molecular weight alcohols, stearyl alcohol, hydroxymethyl cellulose, hydroxypropyl cellulose, hydroxypropyl methylcellulose, lecithin, long chain amino acid derivatives, methylcellulose, natural emulsifiers, oleic acid, oleyl alcohol, pectin, PLUORINC®F 68, POLOXAMER® 188, poly(vinyl-pyrrolidone), polyacrylic acid, polyethoxylated castor oil, polyethylene glycol fatty acid esters (e.g., CREMOPHOR®), polyoxyethylene esters (e.g. polyoxyethylene monostearate [MYRJ®45], polyoxyethylene ethers, polyoxyethylene hydrogenated castor oil, polyoxyethylene sorbitan [TWEENn®60], polyoxyethylene sorbitan monooleate [TWEEN®80], polyoxymethylene stearate, polyvinyl alcohol), potassium oleate, powdered cellulose, sodium alginate, sodium lauryl sulfate, sodium oleate, sorbitan fatty acid esters (e.g. polyoxyethylene sorbitan monolaurate [TWEEN®20], sorbitan monooleate [SPAN®80]), sorbitan monopalmitate [SPAN®40], sorbitan monostearate [SPAN®60], sorbitan tristearate [SPAN®65], sucrose fatty acid esters, tragacanth, triacetin monostearate, triethanolamine oleate, wax, wool fat, xanthan, and/or combinations thereof.

[1696] Non-limiting example binding agents include, but are not limited to: starch (e.g. cornstarch and starch paste); gelatin; sugars (e.g. sucrose, glucose, dextrose, dextrin, molasses, lactose, lactitol, mannitol); natural and synthetic gums (e.g. acacia, sodium alginate, extract of Irish moss, panwar gum, ghatti gum, mucilage of isapol husks, carboxymethylcellulose, methylcellulose, ethylcellulose, hydroxyethylcellulose, hydroxypropyl cellulose, hydroxypropyl methylcellulose, microcrystalline cellulose, cellulose acetate, poly(vinyl-pyrrolidone), magnesium aluminum silicate (Veegum®); and larch arabogalactan; alginates; polyethylene oxide; polyethylene glycol; inorganic calcium salts; silicic acid; polymethacrylates; waxes; water; alcohol; and combinations thereof.

[1697] Non-limiting example preservatives may include, but are not limited to: acidic preservatives, alcohol preservatives, antifungal preservatives, antimicrobial preservatives, antioxidants, chelating agents, and/or other preservatives.

[1698] Non-limiting example antioxidants include, but are not limited to: alpha tocopherol, ascorbic acid, ascorbyl palmitate, butylated hydroxyanisole, butylated hydroxytoluene, monothioglycerol, potassium metabisulfite, propionic acid, propyl gallate, sodium ascorbate, sodium bisulfite, sodium metabisulfite, and sodium sulfite.

[1699] Non-limiting example chelating agents include: citric acid monohydrate, dipotassium edetate, disodium edetate, edetic acid, ethylenediaminetetraacetic acid (EDTA), fumaric acid, malic acid, phosphoric acid, sodium edetate, tartaric acid, and trisodium edetate,

[1700] Non-limiting example antimicrobial preservatives include, but are not limited to: benzalkonium chloride, benzethonium chloride, benzyl alcohol, bronopol, cetrimide, cetylpyridinium chloride, chlorhexidine, chlorobutanol, chlorocresol, chloroxylenol, cresol, ethyl alcohol, glycerin, hexetidine, imidurea, phenol, phenoxyethanol, phenylethyl alcohol, phenylmercuric nitrate, propylene glycol, and thimerosal.

[1701] Non-limiting example antifungal preservatives include, but are not limited to: benzoic acid, butyl paraben, ethyl paraben, hydroxybenzoic acid, methyl paraben, potassium benzoate, potassium sorbate, propyl paraben, sodium benzoate, sodium propionate, and sorbic acid.

[1702] Non-limiting example alcohol preservatives include, but are not limited to, bisphenol, chlorobutanol, ethanol, hydroxybenzoate, phenol, phenolic compounds, phenylethyl alcohol, and polyethylene glycol.

[1703] Non-limiting example acidic preservatives include, but are not limited to, acetic acid, ascorbic acid, beta-carotene, citric acid, dehydroacetic acid, phytic acid, sorbic acid, vitamin A, vitamin C, vitamin E, Other preservatives include, but are not limited to, butylated hydroxyanisol (BHA), butylated hydroxytoluened (BHT), cetrimide, deteroxime mesylate, ethylenediamine, EUXYL®, GERMABEN®II, GERMALL® 115, GLYDANT PLUS®, KATHON™, methylparaben, NEOLONE™, PHENONIP®, potassium metabisulfite, potassium sulfite, sodium bisulfite, sodium lauryl ether sulfate (SLES), sodium lauryl sulfate (SLS), sodium metabisulfite, tocopherol acetate, and tocopherol.

[1704] Non-limiting example buffering agents include, but are not limited to: acetate buffer solutions, alginic acid, aluminum hydroxide, ammonium chloride, calcium carbonate, calcium chloride, calcium citrate, calcium glubionate, calcium gluceptate, calcium gluconate, calcium glycerophosphate, calcium hydroxide phosphate, calcium lactate, calcium levulinate, citrate buffer solutions, D-gluconic acid, dibasic calcium phosphate, dibasic potassium phosphate, dibasic sodium phosphate, ethyl alcohol, isotonic saline, magnesium hydroxide, monobasic potassium phosphate, monobasic sodium phosphate, pentanoic acid, phosphate buffer solutions, phosphoric acid, potassium acetate, potassium chloride, potassium gluconate, potassium mixtures, potassium phosphate mixtures, propanoic acid, pyrogen-free water, Ringer's solution, sodium acetate, sodium bicarbonate, sodium chloride, sodium citrate, sodium lactate, sodium phosphate mixtures, tribasic calcium phosphate, tromethamine, and/or combinations thereof.

[1705] Non-limiting example lubricating agents include, but are not limited to: calcium stearate, glyceryl behenate, hydrogenated vegetable oils, leucine, magnesium lauryl sulfate, magnesium stearate, malt, polyethylene glycol, silica, sodium acetate, sodium benzoate, sodium chloride, sodium lauryl sulfate, stearic acid, talc, and/or combinations thereof.

[1706] Non-limiting example oils include, but are not limited to: almond, apricot kernel, avocado, babassu, bergamot, black current seed, borage, cade, camomile, canola, caraway, carnauba, castor, cinnamon, cocoa butter, coconut, cod liver, coffee, corn, cotton seed, emu, eucalyptus, evening primrose, fish, flaxseed, geraniol, gourd, grape seed, hazel nut, hyssop, isopropyl myristate, jojoba, kukui nut, lavandin, lavender, lemon, litsea cubeba, macadamia nut, mallow, mango seed, meadowfoam seed, mink, nutmeg, olive, orange, orange roughy, palm, palm kernel, peach kernel, peanut, poppy seed, pumpkin seed, rapeseed, rice bran, rosemary, safflower, sandalwood, sasquana, savoury, sea buckthorn, sesame, shea butter, silicone, soybean, sunflower, tea tree, thistle, tsubaki, vetiver, walnut, and wheat germ oils.

[1707] Non-limiting example oils include, but are not limited to: butyl stearate, caprylic triglyceride, capric triglyceride, cyclomethicone, diethyl sebacate, dimethicone 360, isopropyl myristate, mineral oil, octyldodecanol, oleyl alcohol, silicone oil, and/or combinations thereof. Non-limiting example excipients include, but are not limited to: cocoa butter and suppository waxes, coloring agents, coating agents, sweetening, flavoring, and/or perfuming agents.

[1708] As a non-limiting example, in an in vitro experiment, the results of which are shown in FIG. 1, a composition comprising a biologically active agent and a lipid was delivered to cells in muscle cell proliferation medium. As a non-limiting example, in an in vivo experiment, the results of which are shown in FIGS. 2 to 6, a composition comprising a biologically active agent and a lipid was delivered to mice subcutaneously in PBS.

[1709] Any composition comprising a lipid and a biologically active disclosed herein can be used in any pharmaceutical composition described herein or otherwise known in the art.

### Methods of Delivery of a Pharmaceutical Composition Comprising a Lipid and a Biologically Active Agent

[1710] A pharmaceutical composition comprising a lipid and a biologically active agent can be delivered using any method or device or other modality known in the art, including, but not limited, to any method of administration described herein.

[1711] As a non-limiting example: A pharmaceutical composition comprising a lipid and a biologically active agent can be administered orally, topically, parenterally, by inhalation or spray, or rectally in dosage unit formulations containing conventional non-toxic pharmaceutically acceptable carriers, adjuvants and/or vehicles. The term parenteral as used herein includes percutaneous, subcutaneous, intravascular (e.g., intravenous), intramuscular, intraperitoneal, or intrathecal injection, or infusion techniques and the like. As another non-limiting example: A pharmaceutical composition comprising a lipid and a biologically active agent can be delivered by intravenous infusion, subcutaneous injection, intramuscular injection, intranasal, intrathecal, topical, mucosal delivery, vaginal delivery, oral delivery, intrarectal delivery, conjunctival delivery, intraocular delivery, transcutaneous delivery, or any other modality known in the art.

[1712] The pharmaceutical composition can comprise an therapeutically effective amount or dosage of a lipid and a biologically active agent.

[1713] Dosage levels of the order of from about 0.1 mg to about 140 mg per kilogram of body weight per day are useful in the treatment of the various conditions (about 0.5 mg to about 7 g per subject per day). The amount of active ingredient that can be combined with the carrier materials to produce a single dosage form varies depending upon the host treated and the particular mode of administration. Dosage unit forms generally contain between from about 1 mg to about 500 mg of an active ingredient. It is understood that the specific dose level for any particular subject depends upon a variety of factors including the activity of the specific compound employed, the age, body weight, general health, sex, diet, time of administration, route of administration, and rate of excretion, drug combination and the severity of the particular disease undergoing therapy.

[1714] Any composition comprising a lipid and a biologically active agent can be used in any pharmaceutical composition described herein or otherwise known in the art, and can be used with any method of delivery described herein or otherwise known in the art.

### Methods of Treatment

[1715] A composition comprising a lipid and a biologically active agent, as used herein, can be used to treat a subject in need thereof.

[1716] In various embodiments, the biologically active agent is active against a specific target gene or gene product (such as a RNA, protein or other gene product). In various embodiments, the biologically active agent is active against a specific target gene or gene product (such as a RNA, protein or other gene product), wherein the gene or gene product at least partially mediates and/or is associated with a particular disease or disorder (e.g., a target gene- or target gene or gene product-related disorder or disease). As a non-limiting example, if a biologically active agent is an antibody, the antibody can bind to a particular target gene product, and the target gene product at least partially mediates or is associated with a disorder or disease associated with the target gene or gene product.

[1717] As used herein in the context of a composition comprising a lipid and a biologically active agent, the terms “treat,” “treatment,” and the like, refer to relief from or alleviation of pathological processes. In the context of the present disclosure insofar as it relates to any of the other conditions recited herein below (other than pathological processes mediated by expression of a target gene or gene product, such as a protein), the terms “treat,” “treatment,” and the like mean to relieve or alleviate at least one symptom associated with such condition, or to slow or reverse the progression or anticipated progression of such condition, such as slowing the progression of a lipid disorder, such as atherosclerosis.

[1718] By “lower” in the context of a disease marker or symptom is meant a statistically significant decrease in such level. The decrease can be, for example, at least 10%, at least 20%, at least 30%, at least 40% or more. If, for a particular disease, or for an individual suffering from a particular disease, the levels or expression of a target gene or gene product are elevated, treatment with a composition comprising a lipid and a biologically active agent of the present disclosure can preferably reduce the level or expression of a target gene to a level considered in the literature as within the range of normal for an individual without such disorder.

[1719] The level or expression of a target gene can be measured by evaluation of mRNA (e.g., via Northern blots or PCR), or protein (e.g., Western blots). The effect of a composition comprising a lipid and a biologically active agent on target gene expression can be determined by measuring target gene transcription rates (e.g., via Northern blots; or reverse transcriptase polymerase chain reaction or real-time polymerase chain reaction). Direct measurements can be made of levels of a target gene product, e.g. by Western blots of tissues in which the target gene is expressed.

[1720] In another embodiment of the disclosure, a composition comprising a lipid and a biologically active agent can be administered to non-human animals. For example, the compositions can be given to chickens, turkeys, livestock animals (such as sheep, pigs, horses, cattle, etc.), companion animals (e.g., cats and dogs) and can have efficacy in treatment of cancer and viral diseases. In each case, a biologically active agent would be selected to match the characteristics (e.g., structure, sequence, etc.) of the target gene or gene product of the genome of the animal.

[1721] By “treatment” is meant prophylaxis, therapy, cure, or any other change in a patient's condition indicating improvement or absence of degradation of physical condition. By “treatment” is meant treatment of target gene-related disease (e.g., cancer or viral disease), or any appropriate treatment of any other ailment the patient has. As used herein, the terms “treatment” and “treat” refer to both prophylactic or preventative treatment and curative or disease-modifying treatment, including treatment of patients at risk of contracting a disease or suspected of having a disease, as well as patients already ill or diagnosed as suffering from a condition. The terms “treatment” and “treat” also refer to the maintenance and/or promotion of health in an individual not suffering from a disease but who may be susceptible to developing an unhealthy condition, such as nitrogen imbalance or muscle loss. In one embodiment, “treatment” does not encompass prevention of a disease state. Thus, the present disclosure is useful for suppressing expression of the target gene or gene product and/or treating a target gene-related disease in an individual afflicted by an target gene-related disease, or an individual susceptible to a target gene-related disease. An individual “afflicted” by an target gene-related disease has demonstrated detectable symptoms characteristics of the disease, or had otherwise been shown clinically to have been exposed to or to carry target gene-related disease pathogens or markers. As non-limiting examples, an individual afflicted by an target gene-related disease can show outward symptoms; or can show no outward symptoms but can be shown with a clinical test to carry protein markers associated with an target gene-related disease, or proteins or genetic material associated with a pathogen in the blood.

[1722] An “effective amount” or a “therapeutically effective amount” is an amount that treats a disease or medical condition of an individual, or, more generally, provides a nutritional, physiological or medical benefit to an individual. As used herein, the phrases “therapeutically effective amount” and “prophylactically effective amount” refer to an amount that provides a therapeutic benefit in the treatment, prevention, or management of pathological processes mediated by target gene expression or an overt symptom of pathological processes mediated by target gene expression. The specific amount that is therapeutically effective can be readily determined by an ordinary medical practitioner, and may vary depending on factors known in the art, such as, e.g., the type of pathological processes mediated by target gene expression, the patient's history and age, the stage of pathological processes mediated by target gene expression, and administration of other agents that inhibit pathological processes mediated by a target gene.

[1723] In various embodiments of the disclosure, the patient is at least about 1, 5, 10, 20, 30, 40, 50, 55, 60, 65, 70, or 75 years of age. In various embodiments, the patient is no more than about 1, 5, 10, 20, 30, 40, 50, 55, 60, 65, 70, 75, 80, 90, or 100 years of age. In various embodiments the patient has a body weight of at least about 20, 30, 40, 50, 60, 70, 80, 90, 100, 120, 140, 160, 180, 200, 220, 240, 260, 280, 300, 320, 340, 360, 380 or 400 lbs. In various embodiments, the patient has a body weight of no more than about 20, 30, 40, 50, 60, 70, 80, 90, 100, 120, 140, 160, 180, 200, 220, 240, 260, 280, 300, 320, 340, 360, 380 or 400 lbs.

[1724] In various embodiments of the disclosure, the dosage [measuring only the active ingredient(s)] can be at least about 1, 5, 10, 25, 50, 100, 200, 250, 300, 250, 400, 450, 500, 550, 600, 650, 700, 750, 800, 850, 900, 950 or 1000 ng, 1, 5, 10, 25, 50, 100, 200, 250, 300, 250, 400, 450, 500, 550, 600, 650, 700, 750, 800, 850, 900, 950 or 1000 micrograms, 1, 5, 10, 25, 50, 100, 200, 250, 300, 250, 400, 450, 500, 550, 600, 650, 700, 750, 800, 850, 900, 950 or 1000 mg. In various embodiments, the dosage can be no more than about 10, 25, 50, 100, 200, 250, 300, 250, 400, 450, 500, 550, 600, 650, 700, 750, 800, 850, 900, 950 or 1000 mg. In various embodiments, the dosage can be administered at least more than once a day, daily, more than once a weekly, weekly, bi-weekly, monthly, and/or every 2, 3, 4, 5, 6, 7, 8, 9, 10, 11 or 12 months, or a combination thereof.

[1725] In various embodiments, the dosage is correlated to the body weight or body surface area of the individual. The actual dosage level can be varied to obtain an amount of active agent which is effective for a particular patient, composition and mode of administration, without being toxic to the patient. The selected dose will depend on a variety of pharmacokinetic factors, including the activity of the particular biologically active agent employed, the route of administration, the rate of excretion of biologically active agent, the duration of the treatment, other drugs, compounds and/or materials used in combination with a biologically active agent, the age, sex, weight, condition, general health and prior medical history of the patient, and like factors well known in the medical arts. A physician or veterinarian having ordinary skill in the art can readily determine the effective amount of a biologically active agent required. A suitable dose will be that amount which is the lowest dose effective to produce a therapeutic effect, or a dose low enough to produce a therapeutic effect without causing side effects.

### Use in Treating Muscle-Related Diseases and Disorders.

[1726] In various embodiments, a composition comprising a lipid and a biologically active agent can be used to treat a subject with a muscle-related disorder.

[1727] In various embodiments, a muscle-related disorder is sarcopenia, a muscle movement disorder, a muscle wasting-related disorder, muscle degeneration, muscle weakness, muscular dystrophy, Duchenne muscular dystrophy, heart failure, breathing disorder, skeletal muscle degeneration caused by malnutrition and disease, a muscle-related disease related to impaired insulin-dependent signaling, muscular dystrophy, amyotrophic lateral sclerosis, spinal muscle atrophy and spinal cord injury, ischemic muscle disease. In some embodiments, a muscle related disorder includes, for example, shoulder stiffness, frozen shoulder (stiff shoulder due to age), rheumatoid arthritis, myofascitis, neck muscle rigidity, neck-shoulder-arm syndrome, whiplash syndrome, sprain, tendon sheath inflammation, low back pain syndrome, skeletal muscle atrophy and the like.

[1728] In some embodiments, the present disclosure provides the following embodiments:

1. A composition comprising a lipid and a biologically active agent.
2. A composition comprising a lipid and a biologically active agent, characterized in that the composition delivers the biologically active agent into cells.
3. The composition of any one of the preceding embodiments, wherein the composition delivers the biologically active agent into the cytoplasm of the cells.
4. The composition of any one of the preceding embodiments, wherein the composition delivers the biologically active agent into the nucleus of the cells.
5. A composition comprising a lipid and a biologically active agent, wherein the composition delivers the biologically active agent into cells to a level higher than that observed for the biologically active agent absent the lipid.
6. A composition comprising a lipid and a biologically active agent, wherein the composition is characterized in that it delivers the biologically active agent into muscle cells.
7. The composition of any one of the preceding embodiments, wherein the composition delivers the biologically active agent into the cytoplasm of the muscle cells.
8. The composition of any one of the preceding embodiments, wherein the composition delivers the biologically active agent into the nucleus of the muscle cells.
9. The composition of any one of the preceding embodiments, wherein the composition is characterized in that when administered to a subject, the composition delivers the biologically active agent to a muscle cell in the subject.
10. The composition of any one of the preceding embodiments, wherein the composition delivers the biologically active agent into the cytoplasm of the muscle cells.
11. The composition of any one of the preceding embodiments, wherein the composition delivers the biologically active agent into the nucleus of the muscle cells.
12. A composition for delivery of a biologically active agent to a muscle cell or tissue, comprising a lipid and the biologically active agent.
13. A composition comprising a biologically active agent and a lipid selected from the list of: lauric acid, myristic acid, palmitic acid, stearic acid, oleic acid, linoleic acid, alpha-linolenic acid, gamma-linolenic acid, docosahexaenoic acid (cis-DHA), turbinaric acid and dilinoleyl.
14. A composition comprising a biologically active agent and a lipid selected from:

[chemical structure]

15. A composition comprising a biologically active agent and a lipid,
[1729] wherein the lipid comprises a C₁₀-C₄₀ linear, saturated or partially unsaturated, aliphatic chain, optionally substituted with one or more C₁₋₄ aliphatic group,
[1730] wherein the biologically active agent is selected from the group consisting of: a small molecule, a peptide, a protein, a component of a CRISPR-Cas system, a carbohydrate, a therapeutic agent, a chemotherapeutic agent, a vaccine, a nucleic acid, and a lipid.
   16. A composition comprising a nucleic acid and a lipid, for delivery of the lipid to a muscle cell or tissue.
   17. An oligonucleotide composition comprising a plurality of oligonucleotides, which share:
[1731] 1) a common base sequence;
[1732] 2) a common pattern of backbone linkages; and
[1733] 3) a common pattern of backbone phosphorus modifications;
[1734] wherein one or more oligonucleotides of the plurality are individually conjugated to a lipid.
   18. A chirally controlled oligonucleotide composition comprising a lipid and a plurality of oligonucleotides, which oligonucleotides share:
[1735] 1) a common base sequence;
[1736] 2) a common pattern of backbone linkages; and
[1737] 3) a common pattern of backbone phosphorus modifications;
[1738] wherein:
[1739] b. the composition is chirally controlled in that the plurality of oligonucleotides share the same stereochemistry at one or more chiral internucleotidic linkages;
[1740] c. one or more oligonucleotides of the plurality are individually conjugated to a lipid; and
[1741] d. one or more oligonucleotides of the plurality are optionally and individually conjugated to a targeting compound or moiety.
   19. The composition of any one of the preceding embodiments, wherein the oligonucleotide comprises a sequence which is substantially complementary to that of a targeted element in a nucleic acid in a cell.
   20. The composition of any one of the preceding embodiments, wherein the oligonucleotide comprises a sequence which is substantially complementary to that of a targeted element in a nucleic acid in a cell in a subject.
   21. The composition of any one of the preceding embodiments, wherein the oligonucleotide comprises a sequence which is substantially complementary to that of a targeted element in a nucleic acid in a cell, wherein the nucleic acid is genomic.
   22. The composition of any one of the preceding embodiments, wherein the oligonucleotide comprises a sequence which is substantially complementary to that of a targeted element in a nucleic acid in a cell in a subject, wherein the nucleic acid is genomic.
   23. The composition of any one of the preceding embodiments, wherein the oligonucleotide comprises a sequence which is substantially complementary to that of a targeted element in a nucleic acid in a cell, wherein the targeted element is a mRNA or a portion thereof.
   24. The composition of any one of the preceding embodiments, wherein the oligonucleotide comprises a sequence which is substantially complementary to that of a targeted element in a nucleic acid in a cell in a subject, wherein the targeted element is a mRNA or a portion thereof.
   25. The composition of any one of the preceding embodiments, wherein the oligonucleotide comprises a sequence which is substantially complementary to that of a targeted element in a nucleic acid in a cell, wherein the targeted element is associated with a disease, disorder or condition.
   26. The composition of any one of the preceding embodiments, wherein the oligonucleotide comprises a sequence which is substantially complementary to that of a targeted element in a nucleic acid in a cell in a subject, wherein the targeted element is associated with a disease, disorder, or condition.
   27. The composition of any one of the preceding embodiments, wherein the oligonucleotide comprises a sequence which is substantially complementary to that of a targeted element in a nucleic acid in a muscle cell, wherein the targeted element is associated with a muscle disease, disorder, or condition.
   28. The composition of any one of the preceding embodiments, wherein the oligonucleotide comprises a sequence which is substantially complementary to that of a targeted element in a nucleic acid in a muscle cell in a subject, wherein the targeted element is associated with a muscle disease, disorder, or condition.
   29. The composition of any one of the preceding embodiments, wherein a muscle disease, disorder, or condition is DMD.
   30. The composition of any one of the preceding embodiments, wherein a targeted element in a nucleic acid is a targeted element in a transcript of dystrophin.
   31. The composition of any one of the preceding embodiments, wherein the oligonucleotides in the composition provide exon skipping of exon 51 of dystrophin.
   32. The composition of any one of embodiments 17-31, wherein the plurality of oligonucleotides share the same stereochemistry at five or more chiral internucleotidic linkages.
   33. The composition of any one of embodiments 17-31, wherein the plurality of oligonucleotides share the same stereochemistry at ten or more chiral internucleotidic linkages.
   34. The composition of any one of embodiments 17-31, wherein the plurality of oligonucleotides share the same stereochemistry at each of the chiral internucleotidic linkages so that they share a common pattern of backbone chiral centers.
   35. The composition of any one of the preceding embodiments, wherein one or more oligonucleotides of the plurality are independently conjugated to a lipid through a sugar moiety.
   36. The composition of any one of the preceding embodiments, wherein one or more oligonucleotides of the plurality are independently conjugated to a lipid through a 5′-OH on the oligonucleotide.
   37. The composition of any one of the preceding embodiments, wherein one or more oligonucleotides of the plurality are independently conjugated to a lipid through a 3′-OH on the oligonucleotide.
   38. The composition of any one of the preceding embodiments, wherein one or more oligonucleotides of the plurality are independently conjugated to a lipid through a nucleobase moiety.
   39. The composition of any one of the preceding embodiments, wherein one or more oligonucleotides of the plurality are independently conjugated to a lipid through an internucleotidic linkage.
   40. The composition of any one of the preceding embodiments, wherein each oligonucleotide of the plurality is individually conjugated to a lipid.
   41. The composition of any one of the preceding embodiments, wherein each oligonucleotide of the plurality is individually conjugated to the same lipid.
   42. The composition of any one of the preceding embodiments, wherein one or more oligonucleotides comprise two or more conjugated lipids.
   43. The composition of any one of the preceding embodiments, wherein one or more oligonucleotides comprise two or more conjugated lipids, wherein the lipids are the same.
   44. The composition of any one of embodiments 1-43, wherein one or more oligonucleotides comprises two or more conjugated lipids, wherein the lipids are different.
   45. A composition comprising a biologically active agent and a lipid, wherein the agent is any agent disclosed herein, and wherein the lipid is any lipid disclosed herein.
   46. A method of delivering an oligonucleotide to a muscle cell or tissue in a human subject, comprising:
[1742] (a) providing a composition of any one of the preceding embodiments; and
[1743] (b) administering the composition to the human subject such that the oligonucleotide is delivered to a muscle cell or tissue in the subject.
   47. A method for delivering a biologically active agent to a muscle cell or tissue comprising preparing a composition according to any one of the preceding embodiments and contacting the cell or tissue with the composition.
   48. A method of modulating the level of a transcript or gene product of a gene in a cell, the method comprising the step of contacting the cell with a composition according to any one of the preceding embodiments, wherein the biologically active agent is capable of modulating the level of the transcript or gene product.
   49. A method for inhibiting expression of a gene in a muscle cell or tissue comprising preparing a composition according to any one of the preceding embodiments and treating the muscle cell or tissue with the composition.
   50. A method for inhibiting expression of a gene in a muscle cell or tissue in a mammal comprising preparing a composition according to any one of the preceding embodiments and administering the composition to the mammal.
   51. A method of treating a disease that is caused by the over-expression of one or several proteins in a muscle cell or tissue in a subject, said method comprising the administration of a composition according to any one of the preceding embodiments to the subject.
   52. A method of treating a disease that is caused by a reduced, suppressed or missing expression of one or several proteins in a subject, said method comprising the administration of a composition according to any one of the preceding embodiments to the subject.
   53. A method for generating an immune response in a subject, said method comprising the administration of a composition according to any one of the preceding embodiments to the subject, wherein the biologically active compound is an immunomodulating nucleic acid.
   54. A method for treating a sign and/or symptom of a disease, disorder, or condition in a subject selected from cancer, a proliferative disease, disorder, or condition, a metabolic disease, disorder, or condition, an inflammatory disease, disorder, or condition, and a viral infection by providing a composition of any one of the preceding embodiments and administering the composition to the subject.
   55. A method of modulating the amount of exon skipping in a cell, the method comprising contacting the cell with a composition according to any one of the preceding embodiments, wherein the biologically active agent is capable of modulating the amount of exon skipping.
   56. A method of administering a biologically active agent to a subject in need thereof, comprising steps of providing a composition comprising the agent a lipid, and administering the composition to the subject, wherein the agent is any agent disclosed herein, and wherein the lipid is any lipid disclosed herein.
   57. A method of treating a disease in a subject, the method comprising steps of providing a composition comprising a biologically active agent and a lipid, and administering a therapeutically effective amount of the composition to the subject, wherein the agent is any agent disclosed herein, and wherein the lipid is any lipid disclosed herein, and wherein the disease is any disease disclosed herein.
   58. The composition or method of any one of the preceding embodiments, wherein a lipid comprises an R^{LD} group, wherein R^{LD} is an optionally substituted, C₁₀-C₈₀ saturated or partially unsaturated aliphatic group, wherein one or more methylene units are optionally and independently replaced by an optionally substituted group selected from C₁-C₆ alkylene, C₁-C₆ alkenylene, —C≡C—, a C₁-C₆ heteroaliphatic moiety, —C(R′)₂—, -Cy-, —O—, —S—, —S—S—, —N(R′)—, —C(O)—, —C(S)—, —C(NR′)—, —C(O)N(R′)—, —N(R′)C(O)N(R′)—, —N(R′)C(O)—, —N(R′)C(O)O—, —OC(O)N(R′)—, —S(O)—, —S(O)₂—, —S(O)₂N(R′)—, —N(R′)S(O)₂— —SC(O)—, —C(O)S—, —OC(O)—, and —C(O)O—, wherein:
[1744] each R′ is independently —R, —C(O)R, —CO₂R, or —SO₂R, or:
[1745] two R′ are taken together with their intervening atoms to form an optionally substituted aryl, carbocyclic, heterocyclic, or heteroaryl ring;
[1746] -Cy- is an optionally substituted bivalent ring selected from carbocyclylene, arylene, heteroarylene, and heterocyclylene; and
[1747] each R is independently hydrogen, or an optionally substituted group selected from C₁-C₆ aliphatic, phenyl, carbocyclyl, aryl, heteroaryl, or heterocyclyl.
   59. The composition or method of any one of the preceding embodiments, wherein a lipid comprises an optionally substituted C₁₀-C₄₀ saturated or partially unsaturated aliphatic chain.
   60. The composition or method of any one of the preceding embodiments, wherein a lipid comprises an optionally substituted C₁₀-C₄₀ linear, saturated or partially unsaturated, aliphatic chain.
   61. The composition or method of any one of the preceding embodiments, wherein a lipid comprises a C₁₀-C₄₀ linear, saturated or partially unsaturated, aliphatic chain, optionally substituted with one or more C₁₋₄ aliphatic group.
   62. The composition or method of any one of the preceding embodiments, wherein a lipid comprises an unsubstituted C₁₀-C₄₀ linear, saturated or partially unsaturated, aliphatic chain.
   63. The composition or method of any one of the preceding embodiments, wherein a lipid comprises no more than one optionally substituted C₁₀-C₄₀ linear, saturated or partially unsaturated, aliphatic chain.
   64. The composition or method of any one of the preceding embodiments, wherein a lipid comprises two or more optionally substituted C₁₀-C₄₀ linear, saturated or partially unsaturated, aliphatic chain.
   65. The composition or method of any one of the preceding embodiments, wherein a lipid comprises no tricyclic or polycyclic moiety.
   66. The composition or method of any one of the preceding embodiments, wherein a lipid has the structure of R′—COOH, wherein R¹ is an optionally substituted C₁₀-C₄₀ saturated or partially unsaturated aliphatic chain.
   67. The composition or method of any one of embodiment 16, wherein the lipid is conjugated through its carboxyl group.
   68. The composition or method according to any one of the preceding embodiments, wherein the lipid is selected from:

[chemical structure]

69. The composition or method of any one of the preceding embodiments, wherein the lipid is conjugated to the biologically active agent.
70. The composition or method of any one of the preceding embodiments, wherein the lipid is directly conjugated to the biologically active agent.
71. The composition or method of any one of the preceding embodiments, wherein the lipid is conjugated to the biologically active agent via a linker.
72. The composition or method of any one of the preceding embodiments, wherein the linker is -L-, wherein L is L is a covalent bond or an optionally substituted, linear or branched C₁-C₁₀ alkylene, wherein one or more methylene units of L are optionally and independently replaced by an optionally substituted group selected from C₁-C₆ alkylene, C₁-C₆ alkenylene, —C≡C—, a C₁-C₆ heteroaliphatic moiety, —C(R′)₂—, -Cy-, —O—, —S—, —S—S—, —N(R′)—, —C(O)—, —C(S)—, —C(NR′)—, —C(O)N(R′)—, —N(R′)C(O)N(R′)—, —N(R′)C(O)—, —N(R′)C(O)O—, —OC(O)N(R′)—, —S(O)—, —S(O)₂—, —S(O)₂N(R′)—, —N(R′)S(O)₂— —SC(O)—, —C(O)S—, —OC(O)—, and —C(O)O—;
[1748] each R′ is independently —R, —C(O)R, —CO₂R, or —SO₂R, or:
[1749] two R′ are taken together with their intervening atoms to form an optionally substituted aryl, carbocyclic, heterocyclic, or heteroaryl ring;
[1750] -Cy- is an optionally substituted bivalent ring selected from carbocyclylene, arylene, heteroarylene, and heterocyclylene; and
[1751] each R is independently hydrogen, or an optionally substituted group selected from C₁-C₆ aliphatic, phenyl, carbocyclyl, aryl, heteroaryl, or heterocyclyl.
   73. The composition or method of any one of the preceding embodiments, wherein the linker is selected from: an uncharged linker; a charged linker; a linker comprising an alkyl; a linker comprising a phosphate; a branched linker; an unbranched linker; a linker comprising at least one cleavage group; a linker comprising at least one redox cleavage group; a linker comprising at least one phosphate-based cleavage group; a linker comprising at least one acid-cleavage group; a linker comprising at least one ester-based cleavage group; and a linker comprising at least one peptide-based cleavage group.
   74. The composition or method of any one of the preceding embodiments, wherein the nucleic acid is an oligonucleotide, an antisense oligonucleotide, an RNAi agent, a miRNA, splice switching oligonucleotide (SSO), immunomodulatory nucleic acid, an aptamer, a ribozyme, a mRNA, a lncRNA, a ncRNA, an antigomir (e.g., an antagonist to a miRNA, IncRNA, ncRNA or other nucleic acid), a plasmid, a vector, or a portion thereof.
   75. The composition or method of any one of the preceding embodiments, wherein the RNAi agent is a siRNA, a shRNA, a miRNA, a sisiRNA, a meroduplex RNA (mdRNA), a DNA-RNA chimera, a siRNA comprising two mismatches (or more mismatches), a neutral siRNA, an aiRNA, or a siRNA comprising a terminal or internal spacer.
   76. The composition or method of any one of the preceding embodiments, wherein each oligonucleotide of the plurality is individually conjugated to the same lipid at the same location.
   77. The composition or method of any one of the preceding embodiments, wherein a lipid is conjugated to an oligonucleotide through a linker.
   78. The composition or method of any one of the preceding embodiments, wherein one or more oligonucleotides of the plurality are independently conjugated to a targeting compound or moiety.
   79. The composition or method of any one of the preceding embodiments, wherein one or more oligonucleotides of the plurality are independently conjugated to a lipid and a targeting compound or moiety.
   80. The composition or method of any one of the preceding embodiments, wherein one or more oligonucleotides of the plurality are independently conjugated to a lipid at one end and a targeting compound or moiety at the other.
   81. The composition or method of any one of the preceding embodiments, wherein oligonucleotides of the plurality share the same chemical modification patterns.
   82. The composition or method of any one of the preceding embodiments, wherein oligonucleotides of the plurality share the same chemical modification patterns comprising one or more base modifications.
   83. The composition or method of any one of the preceding embodiments, wherein oligonucleotides of the plurality share the same chemical modification patterns comprising one or more sugar modifications.
   84. The composition or method of any one of the preceding embodiments, wherein the common base sequence is capable of hybridizing with a transcript in a muscle cell, which transcript contains a mutation that is linked to a muscle disease, or whose level, activity and/or distribution is linked to a muscle disease.
   85. The composition or method of any one of the preceding embodiments, wherein the common base sequence is capable of hybridizing with a transcript in a muscle cell, and the composition is characterized in that when it is contacted with the transcript in a transcript splicing system, splicing of the transcript is altered relative to that observed under reference conditions selected from the group consisting of absence of the composition, presence of a reference composition, and combinations thereof.
   86. The composition or method of any one of the preceding embodiments, wherein the common base sequence hybridizes with a transcript of dystrophin.
   87. The composition or method of any one of the preceding embodiments, wherein the common base sequence hybridizes with a transcript of dystrophin, and the composition increases the production of one or more functional or partially functional proteins encoded by dystrophin.
   88. The composition or method of any one of the preceding embodiments, wherein the oligonucleotide or oligonucleotides is or are splice switching oligonucleotide or oligonucleotides.
   89. The composition or method of any one of the preceding embodiments, wherein the plurality of oligonucleotides share a common pattern of sugar modification, which comprises 3, 4, 5, 6, 7, 8, 9 or more 2′-F.
   90. The composition or method of any one of the preceding embodiments, wherein the plurality of oligonucleotides share a common pattern of sugar modification, which comprises 3 or more 2′-F.
   91. The composition or method of any one of the preceding embodiments, wherein the plurality of oligonucleotides share a common pattern of sugar modification, which comprises 3, 4, 5, 6, 7, 8, 9 or more consecutive 2′-F.
   92. The composition or method of any one of the preceding embodiments, wherein the plurality of oligonucleotides share a common pattern of sugar modification, which comprises 3 or more consecutive 2′-F.
   93. The composition or method of any one of the preceding embodiments, wherein the plurality of oligonucleotides share a common pattern of sugar modification, which comprises 3, 4, 5, 6, 7, 8, 9 or more 2′-F within the 10 nucleotides at the 5′-end.
   94. The composition or method of any one of the preceding embodiments, wherein the plurality of oligonucleotides share a common pattern of sugar modification, which comprises 3 or more 2′-F within the 10 nucleotides at the 5′-end.
   95. The composition or method of any one of the preceding embodiments, wherein the plurality of oligonucleotides share a common pattern of sugar modification, which comprises 3, 4, 5, 6, 7, 8, 9 or more consecutive 2′-F at the 5′-end.
   96. The composition or method of any one of the preceding embodiments, wherein the plurality of oligonucleotides share a common pattern of sugar modification, which comprises 3 or more consecutive 2′-F at the 5′-end.
   97. The composition or method of any one of the preceding embodiments, wherein the plurality of oligonucleotides share a common pattern of sugar modification, which comprises 3, 4, 5, 6, 7, 8, 9 or more consecutive 2′-F within the 10 nucleotides at the 5′-end.
   98. The composition or method of any one of the preceding embodiments, wherein the plurality of oligonucleotides share a common pattern of sugar modification, which comprises 3 or more consecutive 2′-F within the 10 nucleotides at the 5′-end.
   99. The composition or method of any one of the preceding embodiments, wherein the plurality of oligonucleotides share a common pattern of sugar modification, which comprises 3, 4, 5, 6, 7, 8, 9 or more 2′-F within the 10 nucleotides at the 3′-end.
   100. The composition or method of any one of the preceding embodiments, wherein the plurality of oligonucleotides share a common pattern of sugar modification, which comprises 3 or more 2′-F within the 10 nucleotides at the 3′-end.
   101. The composition or method of any one of the preceding embodiments, wherein the plurality of oligonucleotides share a common pattern of sugar modification, which comprises 3, 4, 5, 6, 7, 8, 9 or more consecutive 2′-F at the 3′-end.
   102. The composition or method of any one of the preceding embodiments, wherein the plurality of oligonucleotides share a common pattern of sugar modification, which comprises 3 or more consecutive 2′-F at the 3′-end.
   103. The composition or method of any one of the preceding embodiments, wherein the plurality of oligonucleotides share a common pattern of sugar modification, which comprises 3, 4, 5, 6, 7, 8, 9 or more consecutive 2′-F within the 10 nucleotides at the 3′-end.
   104. The composition or method of any one of the preceding embodiments, wherein the plurality of oligonucleotides share a common pattern of sugar modification, which comprises 3 or more consecutive 2′-F within the 10 nucleotides at the 3′-end.
   105. The composition or method of any one of the preceding embodiments, wherein the plurality of oligonucleotides share a common pattern of sugar modification, which comprises 5 or more 2′-F within the 10 nucleotides at the 5′-end.
   106. The composition or method of any one of the preceding embodiments, wherein the plurality of oligonucleotides share a common pattern of sugar modification, which comprises 5 or more consecutive 2′-F within the 10 nucleotides at the 5′-end.
   107. The composition or method of any one of the preceding embodiments, wherein the plurality of oligonucleotides share a common pattern of sugar modification, which comprises 5 or more 2′-F within the 10 nucleotides at the 3′-end.
   108. The composition or method of any one of the preceding embodiments, wherein the plurality of oligonucleotides share a common pattern of sugar modification, which comprises 6 or more consecutive 2′-F within the 10 nucleotides at the 5′-end.
   109. The composition or method of any one of the preceding embodiments, wherein the plurality of oligonucleotides share a common pattern of sugar modification, which comprises 6 or more 2′-F within the 10 nucleotides at the 3′-end.
   110. The composition or method of any one of the preceding embodiments, wherein the plurality of oligonucleotides share a common pattern of sugar modification, which comprises 7 or more consecutive 2′-F at the 5′-end.
   111. The composition or method of any one of the preceding embodiments, wherein the plurality of oligonucleotides share a common pattern of sugar modification, which comprises 7 or more consecutive 2′-F at the 3′-end.
   112. The composition or method of any one of the preceding embodiments, wherein the plurality of oligonucleotides share a common pattern of sugar modification, which comprises 3 or more consecutive 2′-F at the 5′-end, 3 or more consecutive 2′-F at the 3′-end, and 3 or more 2′-OR between the 5′-end 2′-F and the 3′-end 2′-F modifications.
   113. The composition or method of any one of the preceding embodiments, wherein the plurality of oligonucleotides share a common pattern of sugar modification, which comprises 3 or more 2′-F at the 5′-end, 3 or more 2′-F at the 3′-end, and 3 or more 2′-OR between the 5′-end 2′-F and the 3′-end 2′-F modifications.
   114. The composition or method of any one of the preceding embodiments, wherein the plurality of oligonucleotides share a common pattern of sugar modification, which comprises 7 or more 2′-F within the 10 nucleotides at the 3′-end.
   115. The composition or method of any one of the preceding embodiments, wherein the plurality of oligonucleotides share a common pattern of sugar modification, which comprises 5 or more consecutive 2′-F within the 10 nucleotides at the 3′-end.
   116. The composition or method of any one of the preceding embodiments, wherein the plurality of oligonucleotides share a common pattern of sugar modification, which comprises 7 or more consecutive 2′-F at the 3′-end.
   117. The composition or method of any one of the preceding embodiments, wherein the plurality of oligonucleotides comprises a 5′-wing-core-wing-3′ structure, wherein each wing region independently comprises 3 to 10 nucleosides, and the core region independently comprises 3 to 10 nucleosides.
   118. The composition or method of any one of the preceding embodiments, wherein the plurality of oligonucleotides comprises a 5′-wing-core-3′ or a 5′-core-wing-3′ structure, wherein each wing region independently comprises 3 to 10 nucleosides, and the core region independently comprises 3 to 10 nucleosides.
   119. The composition or method of any one of the preceding embodiments, wherein a 5′-wing region comprises 3, 4, 5, 6, 7, 8, 9 or more 2′-F.
   120. The composition or method of any one of the preceding embodiments, wherein a 5′-wing region comprises 3 or more 2′-F.
   121. The composition or method of any one of the preceding embodiments, wherein a 5′-wing region comprises 5 or more 2′-F.
   122. The composition or method of any one of the preceding embodiments, wherein a 5′-wing region comprises 3, 4, 5, 6, 7, 8, 9 or more consecutive 2′-F.
   123. The composition or method of any one of the preceding embodiments, wherein a 5′-wing region comprises 3 or more consecutive 2′-F.
   124. The composition or method of any one of the preceding embodiments, wherein a 5′-wing region comprises 5 or more consecutive 2′-F.
   125. The composition or method of any one of the preceding embodiments, wherein a 5′-wing region comprises 10%, 20%, 30%, 40%, 50%, 60%, 70%, 80%, 90% or more 2′-F.
   126. The composition or method of any one of the preceding embodiments, wherein each sugar of a 5′-wing region comprises a 2′-F.
   127. The composition or method of any one of the preceding embodiments, wherein a 5′-wing region comprises 3 or more chiral internucleotidic linkages.
   128. The composition or method of any one of the preceding embodiments, wherein a 5′-wing region comprises 3 or more consecutive chiral internucleotidic linkages.
   129. The composition or method of any one of the preceding embodiments, wherein a 5′-wing region comprises 10% or more chiral internucleotidic linkages.
   130. The composition or method of any one of the preceding embodiments, wherein each internucleotidic linkage of a 5′-wing region is chiral.
   131. The composition or method of any one of the preceding embodiments, wherein each internucleotidic linkage of a 5′-wing region is a phosphorothioate linkage.
   132. The composition or method of any one of the preceding embodiments, wherein a 5′-wing region comprises 5 or more Rp chiral internucleotidic linkages.
   133. The composition or method of any one of the preceding embodiments, wherein a 5′-wing region comprises 5 or more Rp consecutive internucleotidic linkages.
   134. The composition or method of any one of the preceding embodiments, wherein a 5′-wing region comprises 10%, 20%, 30%, 40%, 50%, 60%, 70%, 80%, 90% or more Rp internucleotidic linkages.
   135. The composition or method of any one of the preceding embodiments, wherein each internucleotidic linkage of a 5′-wing region is Rp.
   136. The composition or method of any one of the embodiments 1-134, wherein a 5′-wing region comprises 5 or more Sp chiral internucleotidic linkages.
   137. The composition or method of any one of the embodiments 1-134, wherein a 5′-wing region comprises 5 or more Sp consecutive internucleotidic linkages.
   138. The composition or method of any one of the embodiments 1-134, wherein a 5′-wing region comprises 10%, 20%, 30%, 40%, 50%, 60%, 70%, 80%, 90% or more Sp internucleotidic linkages.
   139. The composition or method of any one of the embodiments 1-134, wherein each internucleotidic linkage of a 5′-wing region is Sp.
   140. The composition or method of any one of the preceding embodiments, wherein a 3′-wing region comprises 3, 4, 5, 6, 7, 8, 9 or more 2′-F.
   141. The composition or method of any one of the preceding embodiments, wherein a 3′-wing region comprises 3 or more 2′-F.
   142. The composition or method of any one of the preceding embodiments, wherein a 3′-wing region comprises 5 or more 2′-F.
   143. The composition or method of any one of the preceding embodiments, wherein a 3′-wing region comprises 3, 4, 5, 6, 7, 8, 9 or more consecutive 2′-F.
   144. The composition or method of any one of the preceding embodiments, wherein a 3′-wing region comprises 3 or more consecutive 2′-F.
   145. The composition or method of any one of the preceding embodiments, wherein a 3′-wing region comprises 5 or more consecutive 2′-F.
   146. The composition or method of any one of the preceding embodiments, wherein a 3′-wing region comprises 10%, 20%, 30%, 40%, 50%, 60%, 70%, 80%, 90%, or more 2′-F.
   147. The composition or method of any one of the preceding embodiments, wherein each sugar of a 3′-wing region comprises a 2′-F.
   148. The composition or method of any one of the preceding embodiments, wherein a 3′-wing region comprises 3 or more chiral internucleotidic linkages.
   149. The composition or method of any one of the preceding embodiments, wherein a 3′-wing region comprises 5 or more consecutive internucleotidic linkages.
   150. The composition or method of any one of the preceding embodiments, wherein a 3′-wing region comprises 10%, 20%, 30%, 40%, 50%, 60%, 70%, 80%, 90% or more chiral internucleotidic linkages.
   151. The composition or method of any one of the preceding embodiments, wherein each internucleotidic linkage of a 3′-wing region is chiral.
   152. The composition or method of any one of the preceding embodiments, wherein each internucleotidic linkage of a 3′-wing region is a phosphorothioate linkage.
   153. The composition or method of any one of the preceding embodiments, wherein a 3′-wing region comprises 3 or more Rp chiral internucleotidic linkages.
   154. The composition or method of any one of the preceding embodiments, wherein a 3′-wing region comprises 5 or more Rp consecutive internucleotidic linkages.
   155. The composition or method of any one of the preceding embodiments, wherein a 3′-wing region comprises 10%, 20%, 30%, 40%, 50%, 60%, 70%, 80%, 90% or more Rp internucleotidic linkages.
   156. The composition or method of any one of the preceding embodiments, wherein each internucleotidic linkage of a 3′-wing region is Rp.
   157. The composition or method of any one of the embodiments 1-155, wherein a 3′-wing region comprises 3 or more Sp chiral internucleotidic linkages.
   158. The composition or method of any one of the embodiments 1-155, wherein a 3′-wing region comprises 5 or more Sp consecutive internucleotidic linkages.
   159. The composition or method of any one of the embodiments 1-155, wherein a 3′-wing region comprises 10%, 20%, 30%, 40%, 50%, 60%, 70%, 80%, 90% or more Sp internucleotidic linkages.
   160. The composition or method of any one of the embodiments 1-155, wherein each internucleotidic linkage of a 3′-wing region is Sp.
   161. The composition or method of any one of the preceding embodiments, wherein the 5′-wing and the 3′-wing have the same length, pattern of chemical modifications, pattern of backbone internucleotidic linkages, and pattern of backbone chiral centers.
   162. The composition or method of any one of the preceding embodiments, wherein the internucleotidic linkage between the 5′-wing region and the core region is a chiral internucleotidic linkage.
   163. The composition or method of any one of the preceding embodiments, wherein the internucleotidic linkage between the 5′-wing region and the core region is a phosphorothioate linkage.
   164. The composition or method of any one of the preceding embodiments, wherein the internucleotidic linkage between the 5′-wing region and the core region is an Rp phosphorothioate linkage.
   165. The composition or method of any one of the preceding embodiments, wherein the internucleotidic linkage between the 3′-wing region and the core region is a chiral internucleotidic linkage.
   166. The composition or method of any one of the preceding embodiments, wherein the internucleotidic linkage between the 3′-wing region and the core region is a phosphorothioate linkage.
   167. The composition or method of any one of the preceding embodiments, wherein the internucleotidic linkage between the 3′-wing region and the core region is an Rp phosphorothioate linkage.
   168. The composition or method of any one of the preceding embodiments, wherein a core region comprises 3, 4, 5, 6, 7, 8, 9 or more 2′-OR.
   169. The composition or method of any one of the preceding embodiments, wherein a core region comprises 3 or more 2′-OR.
   170. The composition or method of any one of the preceding embodiments, wherein a core region comprises 5 or more consecutive 2′-OR.
   171. The composition or method of any one of the preceding embodiments, wherein a core region comprises 10%, 20%, 30%, 40%, 50%, 60%, 70%, 80%, 90% or more 2′-OR.
   172. The composition or method of any one of the preceding embodiments, wherein each sugar of a core region comprises a 2′-OR.
   173. The composition or method of any one of the preceding embodiments, wherein a 2′-OR modification is a 2′-OMe modification.
   174. The composition or method of any one of the preceding embodiments, wherein a core region comprises 3 or more chiral internucleotidic linkages.
   175. The composition or method of any one of the preceding embodiments, wherein a core region comprises 5 or more consecutive chiral internucleotidic linkages.
   176. The composition or method of any one of the preceding embodiments, wherein a core region comprises 10% or more chiral internucleotidic linkages.
   177. The composition or method of any one of the preceding embodiments, wherein each internucleotidic linkage of a core region is chiral.
   178. The composition or method of any one of the preceding embodiments, wherein each internucleotidic linkage of a core region is a phosphorothioate linkage.
   179. The composition or method of any one of the preceding embodiments, wherein a core region comprises 3, 4, 5, 6, 7, 8, 9 or more Sp chiral internucleotidic linkages.
   180. The composition or method of any one of the preceding embodiments, wherein a core region comprises 3 or more Sp chiral internucleotidic linkages.
   181. The composition or method of any one of the preceding embodiments, wherein a core region comprises 5 or more Sp consecutive internucleotidic linkages.
   182. The composition or method of any one of the preceding embodiments, wherein a core region comprises 10%, 20%, 30%, 40%, 50%, 60%, 70%, 80%, 90% or more Sp internucleotidic linkages.
   183. The composition or method of any one of the preceding embodiments, wherein each internucleotidic linkage of a core region is Sp.
   184. The composition or method of any one of embodiments 1-182, wherein a core region comprises 3, 4, 5, 6, 7, 8, 9 or more Rp chiral internucleotidic linkages.
   185. The composition or method of any one of embodiments 1-182, wherein a core region comprises 3 or more Rp chiral internucleotidic linkages.
   186. The composition or method of any one of embodiments 1-182, wherein a core region comprises 5 or more Rp consecutive internucleotidic linkages.
   187. The composition or method of any one of embodiments 1-182, wherein a core region comprises 10%, 20%, 30%, 40%, 50%, 60%, 70%, 80%, 90% or more Rp internucleotidic linkages.
   188. The composition or method of any one of embodiments 1-178, wherein each internucleotidic linkage of a core region is Rp.
   189. The composition or method of any one of the preceding embodiments, wherein a 5′-wing region comprises 10% or more Sp internucleotidic linkages.
   190. The composition or method of any one of the preceding embodiments, wherein a 3′-wing region comprises 10% or more Sp internucleotidic linkages.
   191. The composition or method of any one of the preceding embodiments, wherein the internucleotidic linkage between the 5′-wing region and the core region is an Sp phosphorothioate linkage.
   192. The composition or method of any one of the preceding embodiments, wherein the internucleotidic linkage between the 3′-wing region and the core region is an Sp phosphorothioate linkage.
   193. The composition or method of any one of the preceding embodiments, wherein the nucleic acid is a splice switching oligonucleotide (SSO).
   194. The composition or method of any one of the preceding embodiments, wherein the nucleic acid is a splice switching oligonucleotide (SSO) which targets dystrophin.
   195. The composition or method of any one of the preceding embodiments, wherein the nucleic acid is a splice switching oligonucleotide (SSO) which targets dystrophin exon 51, 45, 53 or 44.
   196. The composition or method of any one of the preceding embodiments, wherein the nucleic acid is a splice switching oligonucleotide (SSO) which targets dystrophin exon 51.
   197. The composition or method of any one of the preceding embodiments, wherein the immunomodulatory nucleic acid is a CpG oligonucleotide.
   198. The composition or method of any one of the preceding embodiments, wherein the immunomodulatory nucleic acid is a CpG oligonucleotide which is capable of agonizing an immune response which is TLR9-mediated or TLR9-associated.
   199. The composition or method of any one of the preceding embodiments, wherein the immunomodulatory nucleic acid is a CpG oligonucleotide which is capable of antagonizing an immune response which is TLR9-mediated or TLR9-associated.
   200. The composition or method of any one of the preceding embodiments, wherein the oligonucleotide comprises a strand of about 14 to about 49 nucleotides.
   201. The composition or method of any one of the preceding embodiments, where the oligonucleotide further comprises a second strand.
   202. The composition or method of any one of the preceding embodiments, wherein the oligonucleotide comprises at least one modification to a base, sugar or internucleoside linkage.
   203. The composition or method of any one of the preceding embodiments, wherein the modification is a sugar modifications at the 2′ carbon.
   204. The composition or method of any one of the preceding embodiments, wherein the modification is a sugar modifications at the 2′ carbon selected from: 2′-MOE, 2′-OMe, and 2′-F.
   205. The composition or method of any one of the preceding embodiments, wherein the biologically active agent is a nucleic acid.
   206. The composition or method of any one of the preceding embodiments, wherein the biologically active agent is an immunomodulatory nucleic acid.
   207. The composition or method of any one of the preceding embodiments, wherein the biologically active agent is a CpG oligonucleotide that agonizes or antagonizes an immune response
   208. The composition or method of any one of the preceding embodiments, wherein the biologically active agent is an CpG oligonucleotide that agonizes or antagonizes an immune response which is TLR9-mediated or TLR9-associated.
   209. The composition or method of any one of the preceding embodiments, wherein the biologically active agent is a small molecule, and wherein the small molecule is hydrophobic
   210. The composition or method of any one of the preceding embodiments, wherein the biologically active agent is a hydrophobic small molecule selected from the group consisting of a sterol and a hydrophobic vitamin.
   211. The composition or method of any one of the preceding embodiments, wherein the biologically active agent is cholesterol.
   212. The composition or method of any one of the preceding embodiments, wherein the biologically active agent is a protein selected from the group consisting of a nucleoprotein, a mucoprotein, a lipoprotein, a synthetic polypeptide, a small molecule linked to a protein and a glycoprotein.
   213. The composition or method of any one of the preceding embodiments, wherein the biologically active agent is a nucleic acid in the form of a single stranded or partially double stranded oligomer or a polymer composed of ribonucleotides.
   214. The composition or method of any one of the preceding embodiments, wherein the biologically active agent is a nucleic acid selected from the group consisting of miRNA, antisense oligonucleotides, siRNA, immune-stimulatory oligonucleotides, aptamers, Piwi-interacting RNAs (piRNAs), small nucleolar RNAs (snoRNAs), ribozymes, and plasmids encoding a specific gene or siRNA.
   215. The composition or method of any one of the preceding embodiments, wherein the cell or tissue is a muscle cell or tissue.
   216. The composition or method of any one of the preceding embodiments, wherein the biologically active agent is an oligonucleotide.
   217. The composition or method of any one of the preceding embodiments, wherein the biologically active agent is an oligonucleotide which mediates exon skipping.
   218. The composition or method of any one of the preceding embodiments, wherein the biologically active agent is a stereodefined oligonucleotide which mediates exon skipping.
   219. The composition or method of any one of the preceding embodiments, wherein the disease or disorder is a muscle-related disease or disorder.
   220. The composition or method of any one of the preceding embodiments, wherein the muscle-related disorder is sarcopenia, a muscle movement disorder, a muscle wasting-related disorder, muscle degeneration, muscle weakness, muscular dystrophy, Duchenne muscular dystrophy, heart failure, breathing disorder, skeletal muscle degeneration caused by malnutrition and disease, a muscle-related disease related to impaired insulin-dependent signaling, amyotrophic lateral sclerosis, spinal muscle atrophy and spinal cord injury, ischemic muscle disease.
   221. The composition or method of any one of the preceding embodiments, wherein the cell or tissue is a muscle cell or tissue, wherein the biologically active agent is a stereodefined oligonucleotide which is a splice switching oligonucleotide, and wherein the subject is afflicted with a muscle disorder.
   222. The composition or method of any one of the preceding embodiments, wherein the cell or tissue is a muscle cell or tissue, wherein the biologically active agent is a stereodefined oligonucleotide which is a splice switching oligonucleotide, and wherein the subject is afflicted with muscular dystrophy.
   223. The composition or method of any one of the preceding embodiments, wherein the cell or tissue is a muscle cell or tissue, wherein the biologically active agent is a stereodefined oligonucleotide which is a splice switching oligonucleotide, and wherein the subject is afflicted with Duchenne muscular dystrophy.
   224. The composition or method of any one of the preceding embodiments, wherein sequences of the oligonucleotides comprise or consist of a sequence listed in tables in the Specification.
   225. The composition or method of any one of the preceding embodiments, wherein sequences of the oligonucleotides comprise or consist of UCAAGGAAGAUGGCAUUUCU (SEQ ID NO: 1).
   226. The composition or method of any one of the preceding embodiments, wherein the lipid comprises an optionally substituted, C₁₀-C₈₀ saturated or partially unsaturated aliphatic group, wherein one or more methylene units are optionally and independently replaced by an optionally substituted group selected from C₁-C₆ alkylene, C₁-C₆ alkenylene, —C≡C—, a C₁-C₆ heteroaliphatic moiety, —C(R′)₂—, -Cy-, —O—, —S—, —S—S—, —N(R′)—, —C(O)—, —C(S)—, —C(NR′)—, —C(O)N(R′)—, —N(R′)C(O)N(R′)—, —N(R′)C(O)—, —N(R′)C(O)O—, —OC(O)N(R′)—, —S(O)—, —S(O)₂—, —S(O)₂N(R′)—, —N(R′)S(O)₂—, —SC(O)—, —C(O)S—, —OC(O)—, and —C(O)O—, wherein each variable is independently as defined and described herein.
   227. The composition or method of any one of the preceding embodiments, wherein the lipid comprises an optionally substituted C₁₀-C₈₀ saturated or partially unsaturated, aliphatic chain.
   228. The composition or method of any one of the preceding embodiments, wherein the lipid comprises an optionally substituted C₁₀-C₈₀ linear, saturated or partially unsaturated, aliphatic chain.
   229. The composition or method of any one of the preceding embodiments, wherein the lipid comprises an optionally substituted C₁₀-C₆₀ saturated or partially unsaturated, aliphatic chain.
   230. The composition or method of any one of the preceding embodiments, wherein the lipid comprises an optionally substituted C₁₀-C₆₀ linear, saturated or partially unsaturated, aliphatic chain.
   231. The composition or method of any one of the preceding embodiments, wherein the lipid comprises an optionally substituted C₁₀-C₄₀ saturated or partially unsaturated, aliphatic chain.
   232. The composition or method of any one of the preceding embodiments, wherein the lipid comprises an optionally substituted C₁₀-C₄₀ linear, saturated or partially unsaturated, aliphatic chain.
   233. The composition or method of any one of the preceding embodiments, wherein the lipid comprises an optionally substituted, C₁₀-C₆₀ saturated or partially unsaturated aliphatic group, wherein one or more methylene units are optionally and independently replaced by an optionally substituted group selected from C₁-C₆ alkylene, C₁-C₆ alkenylene, —C≡C—, a C₁-C₆ heteroaliphatic moiety, —C(R′)₂—, -Cy-, —O—, —S—, —S—S—, —N(R′)—, —C(O)—, —C(S)—, —C(NR′)—, —C(O)N(R′)—, —N(R′)C(O)N(R′)—, —N(R′)C(O)—, —N(R′)C(O)O—, —OC(O)N(R′)—, —S(O)—, —S(O)₂—, —S(O)₂N(R′)—, —N(R′)S(O)₂—, —SC(O)—, —C(O)S—, —OC(O)—, and —C(O)O—, wherein each variable is independently as defined and described herein.
   234. The composition or method of any one of the preceding embodiments, wherein the lipid comprises an optionally substituted C₁₀-C₈₀ saturated or partially unsaturated, aliphatic chain.
   235. The composition or method of any one of the preceding embodiments, wherein the lipid comprises an optionally substituted C₁₀-C₆₀ linear, saturated or partially unsaturated, aliphatic chain.
   236. The composition or method of any one of the preceding embodiments, wherein the lipid comprises an optionally substituted C₁₀-C₄₀ linear, saturated or partially unsaturated, aliphatic chain.
   237. The composition or method of any one of the preceding embodiments, wherein the lipid comprises an optionally substituted, C₁₀-C₄₀ saturated or partially unsaturated aliphatic group, wherein one or more methylene units are optionally and independently replaced by an optionally substituted group selected from C₁-C₆ alkylene, C₁-C₆ alkenylene, —C≡C—, a C₁-C₆ heteroaliphatic moiety, —C(R′)₂—, -Cy-, —O—, —S—, —S—S—, —N(R′)—, —C(O)—, —C(S)—, —C(NR′)—, —C(O)N(R′)—, —N(R′)C(O)N(R′)—, —N(R′)C(O)—, —N(R′)C(O)O—, —OC(O)N(R′)—, —S(O)—, —S(O)₂—, —S(O)₂N(R′)—, —N(R′)S(O)₂—, —SC(O)—, —C(O)S—, —OC(O)—, and —C(O)O—, wherein each variable is independently as defined and described herein.
   238. The composition or method of any one of the preceding embodiments, wherein the lipid comprises an optionally substituted C₁₀-C₄₀ saturated or partially unsaturated, aliphatic chain.
   239. The composition or method of any one of the preceding embodiments, wherein the lipid comprises an optionally substituted C₁₀-C₄₀ linear, saturated or partially unsaturated, aliphatic chain.
   240. The composition or method of any one of the preceding embodiments, wherein the composition further comprises one or more additional components selected from: a polynucleotide, carbonic anhydrase inhibitor, a dye, an intercalating agent, an acridine, a cross-linker, psoralene, mitomycin C, a porphyrin, TPPC4, texaphyrin, Sapphyrin, a polycyclic aromatic hydrocarbon phenazine, dihydrophenazine, an artificial endonuclease, a chelating agent, EDTA, an alkylating agent, a phosphate, an amino, a mercapto, a PEG, PEG-40K, MPEG, [MPEG]₂, a polyamino, an alkyl, a substituted alkyl, a radiolabeled marker, an enzyme, a hapten biotin, a transport/absorption facilitator, aspirin, vitamin E, folic acid, a synthetic ribonuclease, a protein, a glycoprotein, a peptide, a molecule having a specific affinity for a co-ligand, an antibody, a hormone, a hormone receptor, a non-peptidic species, a lipid, a lectin, a carbohydrate, a vitamin, a cofactor, or a drug.
   241. The composition or method of any one of the preceding embodiments, wherein the lipid comprises a C₁₀-C₈₀ linear, saturated or partially unsaturated, aliphatic chain.
   242. The composition or method of any one of the preceding embodiments, wherein the composition further comprises a linker linking the biologically active agent and the lipid, wherein the linker is selected from: an uncharged linker; a charged linker; a linker comprising an alkyl; a linker comprising a phosphate; a branched linker; an unbranched linker; a linker comprising at least one cleavage group; a linker comprising at least one redox cleavage group; a linker comprising at least one phosphate-based cleavage group; a linker comprising at least one acid-cleavage group; a linker comprising at least one ester-based cleavage group; a linker comprising at least one peptide-based cleavage group.
   243. The composition or method of any one of the preceding embodiments, wherein the biologically active agent comprises or consists of or is an oligonucleotide or oligonucleotide composition or chirally controlled oligonucleotide composition.
   244. The composition or method of any one of the preceding embodiments, wherein the biologically active agent comprises or consists of or is an oligonucleotide or oligonucleotide composition or chirally controlled oligonucleotide composition, wherein the sequence of the oligonucleotide comprises or consists of the sequence of any oligonucleotide described herein.
   245. The composition or method of any one of the preceding embodiments, wherein the biologically active agent comprises or consists of or is an oligonucleotide or oligonucleotide composition or chirally controlled oligonucleotide composition, wherein the sequence of the oligonucleotide comprises or consists of the sequence of any oligonucleotide listed in Table 4A.
   246. The composition or method of any one of the preceding embodiments, wherein the biologically active agent comprises or consists of or is an oligonucleotide or oligonucleotide composition or chirally controlled oligonucleotide composition, wherein the sequence of the oligonucleotide comprises or consists of the sequence of a splice-switching oligonucleotide.
   247. The composition or method of any one of the preceding embodiments, wherein the biologically active agent comprises or consists of or is an oligonucleotide or oligonucleotide composition or chirally controlled oligonucleotide composition, wherein the sequence of the oligonucleotide comprises or consists of the sequence of an oligonucleotide capable of skipping or mediating skipping of an exon in the dystrophin gene.
   248. The composition or method of any one of the preceding embodiments, wherein the biologically active agent comprises or consists of or is an oligonucleotide or oligonucleotide composition or chirally controlled oligonucleotide composition, wherein the sequence of the oligonucleotide comprises or consists of the sequence of an oligonucleotide capable of skipping or mediating skipping of exon 51 in the dystrophin gene.
   249. The composition or method of any one of the preceding embodiments, wherein the biologically active agent comprises or consists of or is an oligonucleotide or oligonucleotide composition or chirally controlled oligonucleotide composition, wherein the sequence of the oligonucleotide comprises or consists of the sequence of any of: WV-887, WV-896, WV-1709, WV-1710, WV-1714, WV-2095, WV-2100, WV-2106, WV-2107, WV-2108, WV-2109, WV-2223, WV-2224, WV-2225, WV-2226, WV-2227, WV-2228, WV-2229, WV-2230, WV-2438, WV-2444, WV-2445, WV-2526, WV-2527, WV-2528, WV-2529, WV-2530, WV-2531, WV-2533, WV-2578, WV-2580, WV-2587, WV-3047, WV-3152, WV-3472, WV-3473, WV-3507, WV-3508, WV-3509, WV-3510, WV-3511, WV-3512, WV-3513, WV-3514, WV-3515, WV-3545, or WV-3546.
   250. The composition or method of any one of the preceding embodiments, wherein the sequence of an oligonucleotide includes any one or more of: base sequence (including length); pattern of chemical modifications to sugar and base moieties; pattern of backbone linkages; pattern of natural phosphate linkages, phosphorothioate linkages, phosphorothioate triester linkages, and combinations thereof; pattern of backbone chiral centers; pattern of stereochemistry (Rp/Sp) of chiral internucleotidic linkages; pattern of backbone phosphorus modifications; pattern of modifications on the internucleotidic phosphorus atom, such as —S—, and -L-R¹ of formula I.
   251. The composition or method of any one of the preceding embodiments, wherein the muscle cell or tissue is selected from: skeletal muscle, smooth muscle, heart muscle, thoracic diaphragm, gastrocnemius, quadriceps, triceps, and/or heart.
   252. The method of any one of the preceding embodiments, wherein the method delivers the biologically active agent into the cytoplasm of a cell.
   253. The method of any one of the preceding embodiments, wherein the method delivers the biologically active agent into the nucleus of a cell.
   254. The composition or method of any one of the preceding embodiments, wherein the chiral internucleoside linkage is a phosphorothioate.
   255. The composition or method of any one of the preceding embodiments, wherein a common base sequence hybridizes with a transcript of dystrophin, myostatin, Huntingtin, a myostatin receptor, ActRIIB, ActRIIA, DMPK, Malat1, SMN2, dystrophia myotonica protein kinase (DMPK), Proprotein convertase subtilisin/kexin type 9 (PCSK9), SMAD7 or KRT14 (Keratin 14).
   256. The composition or method of any one of the preceding embodiments, wherein the composition delivers the biologically active agent into cells to a level higher than that observed for the biologically active agent absent the lipid.
   257. The composition or method of any one of the preceding embodiments, characterized in that the composition has higher hTLR9 antagonist activity than that observed for the composition absent the lipid.
   258. A method for reducing hTLR9 agonist activities, comprising conjugating a biologically active agent to one or more lipids.
   259. A method for increasing hTLR9 antagonist activities, comprising conjugating a biologically active agent to one or more lipids.
   260. The method of any one of embodiments 258-259, characterized in that the agonist activities are reduced, or the antagonist activities are increased, compared to the biological active agent absent the lipid.
   261. The method of any one of embodiments 258-260, wherein the biological active agent is an oligonucleotides.
   262. The method of any one of embodiments 258-261, wherein the biological active agent is an oligonucleotide of any one of the preceding embodiments.
   263. The method of any one of embodiments 258-262, wherein the lipid is a lipid of any one of the preceding embodiments.
   264. The composition or method of any one of the preceding embodiments, wherein a lipid is conjugated to a biologically active agent via a linker.
   265. The composition or method of any one of the preceding embodiments, wherein the linker is -L^{LD}-.
   266. The composition or method of any one of the preceding embodiments, wherein the linker is -L-.
   267. The composition or method of any one of the preceding embodiments, wherein the linker is —NH—(CH2)6-.
   268. The composition or method of any one of the preceding embodiments, wherein the linker is —C(O)—NH—(CH2)6-P(O)(O—)—.
   269. The composition or method of any one of the preceding embodiments, wherein the linker is —C(O)—NH—(CH2)6-P(O)(S—)—.
   270. The composition of embodiment 268 or 269, wherein the lipid is a fatty acid which is connected to the linker through formation of the amide group —C(O)—NH—, and the oligonucleotide is connected to the linker through formation of a phosphate or phosphorothioate linkage between its 5′-OH or 3′-OH with —P(O)(O—)— or —P(O)(S—)— of the linker.
   271. The composition of embodiment 268 or 269, wherein the lipid is a fatty acid which is connected to the linker through formation of the amide group —C(O)—NH—, and the oligonucleotide is connected to the linker through formation of a phosphate or phosphorothioate linkage between its 5′-OH with —P(O)(O—)— or —P(O)(S—)— of the linker.
   272. The composition of embodiment 268 or 269, wherein the lipid is a fatty acid which is connected to the linker through formation of the amide group —C(O)—NH—, and the oligonucleotide is connected to the linker through formation of a phosphate or phosphorothioate linkage between its 3′-OH with —P(O)(O—)— or —P(O)(S—)— of the linker.
   273. The composition of any one of the preceding embodiments, further comprising one or more targeting components.
   274. A composition comprising a plurality of compounds having the structure of:

A^{c}-[-L^{LD}-(R^{LD})ₐ]_{b} or [(A^{c})ₐ-L^{LD}]_{b}—R^{LD}, or a salt thereof,

wherein:
[1752] A^{c} is a biologically active agent;
[1753] a is 1-1000;
[1754] b is 1-1000;
[1755] each L^{LD} is independently a linker moiety; and
[1756] each R^{LD} is independently a lipid moiety or a targeting component, wherein at least one R^{LD} is a lipid moiety.
   275. A composition comprising a plurality of compounds having the structure of:

A^{c}-[-L^{LD}-(R^{LD})ₐ]_{b} or [(A^{c})ₐ-L^{LD}]_{b}—R^{LD}, or a salt thereof,

wherein:
[1757] A^{c} is a biologically active agent;
[1758] a is 1-1000;
[1759] b is 1-1000;
[1760] each L^{LD} is independently a covalent bond or an optionally substituted, C₁-C₈₀ saturated or partially unsaturated aliphatic group, wherein one or more methylene units are optionally and independently replaced by T^{LD} or an optionally substituted group selected from C₁-C₆ alkylene, C₁-C₆ alkenylene, —C≡C—, a C₁-C₆ heteroaliphatic moiety, —C(R′)₂—, -Cy-, —O—, —S—, —S—S—, —N(R′)—, —C(O)—, —C(S)—, —C(NR′)—, —C(O)N(R′)—, —N(R′)C(O)N(R′)—, —N(R′)C(O)—, —N(R′)C(O)O—, —OC(O)N(R′)—, —S(O)—, —S(O)₂—, —S(O)₂N(R′)—, —N(R′)S(O)₂—, —SC(O)—, —C(O)S—, —OC(O)—, and —C(O)O—;
[1761] each R^{LD} is independently an optionally substituted, C₁-C₈₀ saturated or partially unsaturated aliphatic group, wherein one or more methylene units are optionally and independently replaced by an optionally substituted group selected from C₁-C₆ alkylene, C₁-C₆ alkenylene, —C≡C—, a C₁-C₆ heteroaliphatic moiety, —C(R′)₂—, -Cy-, —O—, —S—, —S—S—, —N(R′)—, —C(O)—, —C(S)—, —C(NR′)—, —C(O)N(R′)—, —N(R′)C(O)N(R′)—, —N(R′)C(O)—, —N(R′)C(O)O—, —OC(O)N(R′)—, —S(O)—, —S(O)₂—, —S(O)₂N(R′)—, —N(R′)S(O)₂—, —SC(O)—, —C(O)S—, —OC(O)—, and —C(O)O—;
[1762] T^{LD} has the structure of:

[chemical structure]

[1763] W is O, S or Se;
[1764] each of X, Y and Z is independently —O—, —S—, —N(-L-R¹)—, or L;
[1765] L is a covalent bond or an optionally substituted, linear or branched C₁-C₁₀ alkylene, wherein one or more methylene units of L are optionally and independently replaced by an optionally substituted group selected from C₁-C₆ alkylene, C₁-C₆ alkenylene, —C≡C—, a C₁-C₆ heteroaliphatic moiety, —C(R′)₂—, -Cy-, —O—, —S—, —S—S—, —N(R′)—, —C(O)—, —C(S)—, —C(NR′)—, —C(O)N(R′)—, —N(R′)C(O)N(R′)—, —N(R′)C(O)—, —N(R′)C(O)O—, —OC(O)N(R′)—, —S(O)—, —S(O)₂—, —S(O)₂N(R′)—, —N(R′)S(O)₂— —SC(O)—, —C(O)S—, —OC(O)—, and —C(O)O—;
[1766] R¹ is halogen, R, or an optionally substituted C₁-C₅₀ aliphatic wherein one or more methylene units are optionally and independently replaced by an optionally substituted group selected from C₁-C₆ alkylene, C₁-C₆ alkenylene, —C≡C—, a C₁-C₆ heteroaliphatic moiety, —C(R′)₂—, -Cy-, —O—, —S—, —S—S—, —N(R′)—, —C(O)—, —C(S)—, —C(NR′)—, —C(O)N(R′)—, —N(R′)C(O)N(R′)—, —N(R′)C(O)—, —N(R′)C(O)O—, —OC(O)N(R′)—, —S(O)—, —S(O)₂—, —S(O)₂N(R′)—, —N(R′)S(O)₂— —SC(O)—, —C(O)S—, —OC(O)—, and —C(O)O—
[1767] each R′ is independently —R, —C(O)R, —CO₂R, or —SO₂R, or:
   [1768] two R′ are taken together with their intervening atoms to form an optionally substituted aryl, carbocyclic, heterocyclic, or heteroaryl ring;
[1769] -Cy- is an optionally substituted bivalent ring selected from phenylene, carbocyclylene, arylene, heteroarylene, and heterocyclylene; and
[1770] each R is independently hydrogen, or an optionally substituted group selected from C₁-C₆ aliphatic, carbocyclyl, aryl, heteroaryl, and heterocyclyl.
   276. The composition of any one of embodiments 274-275, wherein A^{c} is an oligonucleotide chain ([H]_{b}-A^{c} is an oligonucleotide).
   277. The composition or method of any one of embodiments 1-273, wherein the composition is a composition of any one of embodiments 274-276.
   278. The composition or method of any one of embodiments 274-277, wherein the oligonucleotides or oligonucleotides have the structure of A^{c}-[-L^{LD}-(R^{LD})ₐ]_{b}.
   279. The composition or method of any one of embodiments 274-277, wherein the oligonucleotides or oligonucleotides have the structure of [(A^{c})ₐ-L^{LD}]_{b}—R^{LD}.
   280. The composition or method of any one of embodiments 274-279, wherein L^{LD}, R^{LD} combinations of L^{LD} and R^{LD}, or -[-L^{LD}-(R^{LD})ₐ]_{b} comprises one or more lipid moieties.
   281. The composition or method of any one of embodiments 274-279, wherein -[-L^{LD}-(R^{LD})ₐ]_{b} comprises one or more lipid moieties.
   282. The composition or method of any one of embodiments 274-280, wherein R^{LD} comprises one or more lipid moieties.
   283. The composition or method of any one of embodiments 274-279, wherein L^{LD}, R^{LD}, combinations of L^{LD} and R^{LD}, or -[-L^{LD}-(R^{LD})ₐ]_{b} comprises comprises one or more targeting components.
   284. The composition or method of any one of embodiments 274-279, wherein -[-L^{LD}-(R^{LD})ₐ]_{b} comprises one or more targeting components.
   285. The composition or method of any one of embodiments 274-280, wherein R^{LD} comprises one or more targeting components.
   286. The composition or method of any one of embodiments 274-285, wherein b is 1.
   287. The composition or method of any one of embodiments 274-286, wherein a is 1.
   288. The composition or method of any one of embodiments 274-287, wherein A^{c} comprises one or more modified base, sugar, or internucleotidic linkage moieties.
   289. The composition or method of any one of embodiments 274-288, wherein A^{c} comprises one or more chiral internucleotidic linkages.
   290. The composition or method of any one of embodiments 274-289, wherein A^{c} comprises one or more chiral internucleotidic linkages, and each chiral internucleotidic linkage of A^{c} is chirally controlled.
   291. The composition or method of any one of embodiments 274-290, wherein oligonucleotides having the structure of A^{c}-[-L^{LD}-(R^{LD})ₐ]_{b}, or [(A^{c})ₐ-L^{LD}]_{b}—R^{LD}, are of a particular type defined by the 1) base sequence; 2) pattern of backbone linkages; 3) pattern of backbone chiral centers; and 4) pattern of backbone phosphorus modifications of A^{c}.
   292. The composition or method of any one of embodiments 274-287, wherein A^{c} is the oligonucleotide chain of any one of the preceding embodiments.
   293. The composition or method of any one of embodiments 274-292, wherein A^{c} is an oligonucleotide of any one of the preceding embodiments, connecting to L^{LD} through a hydroxyl group of a sugar moiety (—O—).
   294. The composition or method of any one of embodiments 274-293, wherein A^{c} is an oligonucleotide of any one of the preceding embodiments, connecting to L^{LD} through its 5′-O—.
   295. The composition or method of any one of embodiments 274-292, wherein A^{c} is an oligonucleotide of any one of the preceding embodiments, connecting to L^{LD} through a nucleobase.
   296. The composition or method of any one of embodiments 274-292, wherein A^{c} is an oligonucleotide of any one of the preceding embodiments, connecting to L^{LD} through an internucleotidic linkage.
   297. The composition or method of any one of embodiments 274-294, wherein A^{c} is an oligonucleotide selected from any of the Tables and connected to L^{LD} and R^{LD} ([H]_{b}-A^{c} is an oligonucleotide selected from any of the Tables).
   298. The composition or method of any one of embodiments 274-294, wherein A^{c} is WV-887 connected to L^{LD} and R^{LD} ([H]_{b}-A^{c} is WV-887).
   299. The composition or method of any one of embodiments 274-294, wherein A^{c} is WV-892 connected to L^{LD} and R^{LD}.
   300. The composition or method of any one of embodiments 274-294, wherein A^{c} is WV-896 connected to L^{LD} and R^{LD}.
   301. The composition or method of any one of embodiments 274-294, wherein A^{c} is WV-1714 connected to L^{LD} and R^{LD}.
   302. The composition or method of any one of embodiments 274-294, wherein A^{c} is WV-2444 connected to L^{LD} and R^{LD}.
   303. The composition or method of any one of embodiments 274-294, wherein A^{c} is WV-2445 connected to L^{LD} and R^{LD}.
   304. The composition or method of any one of embodiments 274-294, wherein A^{c} is WV-2526 connected to L^{LD} and R^{LD}.
   305. The composition or method of any one of embodiments 274-294, wherein A^{c} is WV-2527 connected to L^{LD} and R^{LD}.
   306. The composition or method of any one of embodiments 274-294, wherein A^{c} is WV-2528 connected to L^{LD} and R^{LD}.
   307. The composition or method of any one of embodiments 274-294, wherein A^{c} is WV-2530 connected to L^{LD} and R^{LD}.
   308. The composition or method of any one of embodiments 274-294, wherein A^{c} is WV-2531 connected to L^{LD} and R^{LD}.
   309. The composition or method of any one of embodiments 274-294, wherein A^{c} is WV-2578 connected to L^{LD} and R^{LD}.
   310. The composition or method of any one of embodiments 274-294, wherein A^{c} is WV-2580 connected to L^{LD} and R^{LD}.
   311. The composition or method of any one of embodiments 274-294, wherein A^{c} is WV-2587 connected to L^{LD} and R^{LD}.
   312. The composition or method of any one of embodiments 274-294, wherein A^{c} is WV-3047 connected to L^{LD} and R^{LD}.
   313. The composition or method of any one of embodiments 274-294, wherein A^{c} is WV-3152 connected to L^{LD} and R^{LD}.
   314. The composition or method of any one of embodiments 274-294, wherein A^{c} is WV-3472 connected to L^{LD} and R^{LD}.
   315. The composition or method of any one of embodiments 274-294, wherein A^{c} is WV-3473 connected to L^{LD} and R^{LD}.
   316. The composition or method of any one of embodiments 274-294, wherein A^{c} is WV-3507 connected to L^{LD} and R^{LD}.
   317. The composition or method of any one of embodiments 274-294, wherein A^{c} is WV-3508 connected to L^{LD} and R^{LD}.
   318. The composition or method of any one of embodiments 274-294, wherein A^{c} is WV-3509 connected to L^{LD} and R^{LD}.
   319. The composition or method of any one of embodiments 274-294, wherein A^{c} is WV-3510 connected to L^{LD} and R^{LD}.
   320. The composition or method of any one of embodiments 274-294, wherein A^{c} is WV-3511 connected to L^{LD} and R^{LD}.
   321. The composition or method of any one of embodiments 274-294, wherein A^{c} is WV-3512 connected to L^{LD} and R^{LD}.
   322. The composition or method of any one of embodiments 274-294, wherein A^{c} is WV-3513 connected to L^{LD} and R^{LD}.
   323. The composition or method of any one of embodiments 274-294, wherein A^{c} is WV-3514 connected to L^{LD} and R^{LD}.
   324. The composition or method of any one of embodiments 274-294, wherein A^{c} is WV-3515 connected to L^{LD} and R^{LD}.
   325. The composition or method of any one of embodiments 274-324, wherein L^{LD} is an optionally substituted, C₁-C₁₀ saturated or partially unsaturated aliphatic group, wherein one or more methylene units are optionally and independently replaced by T^{LD} or an optionally substituted group selected from C₁-C₆ alkylene, C₁-C₆ alkenylene, —C≡C—, a C₁-C₆ heteroaliphatic moiety, —C(R′)₂—, -Cy-, —O—, —S—, —S—S—, —N(R′)—, —C(O)—, —C(S)—, —C(NR′)—, —C(O)N(R′)—, —N(R′)C(O)N(R′)—, —N(R′)C(O)—, —N(R′)C(O)O—, —OC(O)N(R′)—, —S(O)—, —S(O)₂—, —S(O)₂N(R′)—, —N(R′)S(O)₂—, —SC(O)—, —C(O)S—, —OC(O)—, and —C(O)O—.
   326. The composition or method of any one of embodiments 274-324, wherein L^{LD} is an optionally substituted, C₁-C₁₀ saturated or partially unsaturated aliphatic group, wherein one or more methylene units are optionally and independently replaced by an optionally substituted group selected from C₁-C₆ alkylene, C₁-C₆ alkenylene, —C≡C—, -Cy-, —O—, —S—, —N(R′)—, —C(O)—, —C(O)N(R′)—, —N(R′)C(O)N(R′)—, —OC(O)N(R′)—, —S(O)—, —S(O)₂—, —S(O)₂N(R′)—, and —C(O)O—, or T^{LD} wherein W is O or S, each of Y and Z is independently —O—, —S—, or -L-.
   327. The composition or method of any one of embodiments 274-324, wherein L^{LD} is an optionally substituted, C₁-C₁₀ saturated or partially unsaturated aliphatic group, wherein one or more methylene units are optionally and independently replaced by an optionally substituted group selected from C₁-C₆ alkylene, C₁-C₆ alkenylene, —C≡C—, -Cy-, —O—, —S—, —N(R′)—, —C(O)—, —C(O)N(R′)—, —N(R′)C(O)N(R′)—, —OC(O)N(R′)—, —S(O)—, —S(O)₂—, —S(O)₂N(R′)—, and —C(O)O—, or T^{LD} wherein W is O or S, each of X and Y is independently —O—, —S—, or -L-, and Z is a covalent bond.
   328. The composition or method of any one of embodiments 274-326, wherein L^{LD} connects to a hydroxyl group of A^{c}.
   329. The composition or method of any one of embodiments 274-326, wherein L^{LD} connects to 5′-OH of A^{c}.
   330. The composition or method of any one of embodiments 274-326, wherein L^{LD} connects to 3′-OH of A^{c}.
   331. The composition or method of any one of the preceding embodiments, wherein each R′ is independently —R, —C(O)R, —CO₂R, or —SO₂R, or:
   [1771] two R′ are taken together with their intervening atoms to form an optionally substituted C₃-C₁₄ monocyclic, bicyclic or polycyclic aryl, carbocyclic, heterocyclic, or heteroaryl ring having 0-10 heteroatoms.
      332. The composition or method of any one of the preceding embodiments, wherein -Cy- is an optionally substituted bivalent ring selected from C₃-C₁₄ monocyclic, bicyclic or polycyclic carbocyclylene, arylene, heteroarylene, and heterocyclylene having 0-10 heteroatoms.
      333. The composition or method of any one of the preceding embodiments, wherein each R is independently hydrogen, or an optionally substituted group selected from C₁-C₆ aliphatic, and C₃-C₁₄ monocyclic, bicyclic or polycyclic aryl, carbocyclic, heterocyclic, or heteroaryl ring having 0-10 heteroatoms.
      334. The composition or method of any one of embodiments 274-326, wherein L^{L}D is T^{LD}.
      335. The composition or method of any one of embodiments 274-326, wherein L^{L}D is —NH—(CH₂)₆-T^{LD}-.
      336. The composition or method of any one of embodiments 274-326, wherein L^{LD} is —C(O)—NH—(CH₂)₆-T^{LD}-.
      337. The composition or method of embodiment 336, wherein —C(O)— is connected to —R^{LD}.
      338. The composition or method of any one of embodiments 274-337, wherein T^{LD} is connected to 5′-O— or 3′-O— of A^{c}.
      339. The composition or method of any one of embodiments 274-338, wherein T^{LD} is connected to 5′-O— of A^{c}.
      340. The composition or method of any one of embodiments 274-338, wherein T^{LD} is connected to 3′-O— of A^{c}.
      341. The composition or method of any one of embodiments 274-340, wherein T^{LD} forms a phosphorothioate linkage with 5′-O— or 3′-O— of A^{c}.
      342. The composition or method of embodiment 341, wherein a phosphorothioate linkage is chirally controlled and is Sp.
      343. The composition or method of embodiment 341, wherein a phosphorothioate linkage is chirally controlled and is Rp.
      344. The composition or method of any one of embodiments 274-340, wherein T^{LD} forms a phosphate linkage with 5′-O— or 3′-O— of A^{c}.
      345. The composition or method of any one of embodiments 274-324, wherein L^{LD} is a covalent bond.
      346. The composition or method of any one of the preceding embodiments, R^{LD} is an optionally substituted, C₁₀-C₈₀ saturated or partially unsaturated aliphatic group, wherein one or more methylene units are optionally and independently replaced by an optionally substituted group selected from C₁-C₆ alkylene, C₁-C₆ alkenylene, —C≡C—, a C₁-C₆ heteroaliphatic moiety, —C(R′)₂—, -Cy-, —O—, —S—, —S—S—, —N(R′)—, —C(O)—, —C(S)—, —C(NR′)—, —C(O)N(R′)—, —N(R′)C(O)N(R′)—, —N(R′)C(O)—, —N(R′)C(O)O—, —OC(O)N(R′)—, —S(O)—, —S(O)₂—, —S(O)₂N(R′)—, —N(R′)S(O)₂—, —SC(O)—, —C(O)S—, —OC(O)—, and —C(O)O—.
      347. The composition or method of any one of the preceding embodiments, wherein R^{LD} is an optionally substituted, C₁₀-C₈₀ saturated or partially unsaturated aliphatic group, wherein one or more methylene units are optionally and independently replaced by —C(O)—.
      348. The composition or method of any one of the preceding embodiments, wherein R^{LD} is an optionally substituted, C₁₀-C₆₀ saturated or partially unsaturated aliphatic group, wherein one or more methylene units are optionally and independently replaced by —C(O)—.
      349. The composition or method of any one of the preceding embodiments, wherein R^{LD} is an optionally substituted, C₁₀-C₄₀ saturated or partially unsaturated aliphatic group, wherein one or more methylene units are optionally and independently replaced by —C(O)—.
      350. The composition or method of any one of the preceding embodiments, wherein R^{LD} comprises 10, 11, 12, 13, 14, 15, 16, 17, 18, 19, 20, 21, 22, 23, 24, 25, 26, 27, 28, 29, 30 or more carbon atoms.
      351. The composition or method of any one of the preceding embodiments, wherein at least one R^{LD} comprises or is a targeting component.
      352. The composition or method of any one of the preceding embodiments, wherein at least one R^{LD} is a targeting component.
      353. The composition or method of any one of the preceding embodiments, wherein at least one R^{LD} comprises a lipid moiety.
      354. The composition or method of any one of the preceding embodiments, wherein at least one R^{LD} is a lipid moiety.
      355. The composition or method of any one of the preceding embodiments, wherein R^{LD} is an optionally substituted, C₁₀-C₈₀ saturated or partially unsaturated aliphatic group.
      356. The composition or method of any one of the preceding embodiments, wherein R^{LD} is an optionally substituted, C₁₀-C₆₀ saturated or partially unsaturated aliphatic group.
      357. The composition or method of any one of the preceding embodiments, wherein R^{LD} is an optionally substituted, C₁₀-C₄₀ saturated or partially unsaturated aliphatic group.
      358. The composition or method of any one of the preceding embodiments, wherein R^{LD} is unsubstituted linear or branched C₁₀-C₈₀ aliphatic group.
      359. The composition or method of any one of the preceding embodiments, wherein R^{LD} is unsubstituted linear or branched C₁₀-C₆₀ aliphatic group.
      360. The composition or method of any one of the preceding embodiments, wherein R^{LD} is unsubstituted linear or branched C₁₀-C₄₀ aliphatic group.
      361. The composition or method of any one of embodiments 274-360, wherein R^{LD} is palmityl.
      362. The composition or method of any one of the preceding embodiments 274-360, wherein R^{LD} is

[chemical structure]

363. The composition or method of any one of embodiments 274-360, wherein R^{LD} is lauryl.
364. The composition or method of any one of embodiments 274-360, wherein R^{LD} is myristyl.
365. The composition or method of any one of embodiments 274-360, wherein R^{LD} is stearyl.
366. The composition or method of any one of embodiments 274-360, wherein R^{LD} is

[chemical structure]

367. The composition or method of any one of embodiments 274-360, wherein R^{LD} is

[chemical structure]

368. The composition or method of any one of embodiments 274-360, wherein R^{LD} is

[chemical structure]

369. The composition or method of any one of embodiments 274-360, wherein R^{LD} is

[chemical structure]

370. The composition or method of any one of embodiments 274-360, wherein R^{LD} is

[chemical structure]

371. The composition or method of any one of embodiments 274-360, wherein R^{LD} is

[chemical structure]

372. The composition or method of any one of embodiments 274-354, wherein R^{LD} is

[chemical structure]

373. The composition or method of any one of embodiments 274-354, wherein R^{LD} is

[chemical structure]

374. The composition or method of any one of embodiments 274-354, wherein R^{LD} is

[chemical structure]

375. The composition or method of any one of embodiments 274-354, wherein R^{LD} is

[chemical structure]

376. The composition or method of any one of embodiments 274-354, wherein R^{LD} is

[chemical structure]

377. The composition or method of any one of embodiments 274-354, wherein R^{LD} is

[chemical structure]

378. The composition or method of any one of embodiments 274-354, wherein R^{LD} is

[chemical structure]

379. The composition or method of any one of embodiments 274-354, wherein R^{LD} is

[chemical structure]

380. The composition or method of any one of embodiments 274-354, wherein R^{LD} is

[chemical structure]

381. The composition or method of any one of embodiments 274-354, wherein R^{LD} is

[chemical structure]

382. The composition or method of any one of embodiments 274-354, wherein R^{LD} is

[chemical structure]

383. The composition or method of any one of embodiments 274-354, wherein R^{LD} is

[chemical structure]

384. The composition or method of any one of embodiments 274-354, wherein R^{LD} is

[chemical structure]

385. The composition or method of any one of embodiments 274-354, wherein R^{LD} is

[chemical structure]

386. The composition or method of any one of embodiments 274-354, wherein R^{LD} is

[chemical structure]

387. The composition or method of any one of embodiments 274-354, wherein R^{LD} is

[chemical structure]

388. The composition or method of any one of embodiments 274-354, wherein R^{LD} is

[chemical structure]

389. The composition or method of any one of embodiments 274-354, wherein R^{LD} is

[chemical structure]

390. The composition or method of any one of embodiments 274-354, wherein R^{LD} is

[chemical structure]

391. The composition or method of any one of embodiments 274-354, wherein R^{LD} is

[chemical structure]

393. The composition or method of any one of embodiments 274-354, wherein R^{LD} is

[chemical structure]

393. The composition or method of any one of embodiments 274-354, wherein R^{LD} is

[chemical structure]

394. The composition or method of any one of embodiments 274-354, wherein R^{LD} is

[chemical structure]

395. The composition or method of any one of embodiments 274-354, wherein R^{LD} is

[chemical structure]

396. The composition or method of any one of embodiments 274-354, wherein R^{LD} is

[chemical structure]

397. The composition or method of any one of embodiments 274-354, wherein -[-L^{LD}-(R^{LD})ₐ]_{b} is

[chemical structure]

398. The composition or method of any one of embodiments 274-354, wherein -[-L^{LD}-(R^{LD})ₐ]_{b} is

[chemical structure]

399. The composition or method of any one of embodiments 274-354, wherein -[-L^{LD}-(R^{LD})ₐ]_{b} is

[chemical structure]

400. The composition or method of any one of embodiments 274-354, wherein -[-L^{LD}-(R^{LD})ₐ]_{b} is

[chemical structure]

401. The composition or method of any one of embodiments 274-354, wherein -[-L^{LD}-(R^{LD})ₐ]_{b} is

[chemical structure]

402. The composition or method of any one of embodiments 274-354, wherein -[-L^{LD}-(R^{LD})ₐ]_{b} is

[chemical structure]

403. The composition or method of any one of embodiments 274-354, wherein -[-L^{LD}-(R^{LD})ₐ]_{b} is

[chemical structure]

404. The composition or method of any one of embodiments 274-354, wherein -[-L^{LD}-(R^{LD})ₐ]_{b} is

[chemical structure]

405. The composition or method of any one of embodiments 274-354, wherein -[-L^{LD}-(R^{LD})ₐ]_{b} is

[chemical structure]

406. The composition or method of any one of embodiments 274-354, wherein -[-L^{LD}-(R^{LD})ₐ]_{b} is

[chemical structure]

407. The composition or method of any one of embodiments 274-354, wherein -[-L^{LD}-(R^{LD})ₐ]_{b} is

[chemical structure]

408. The composition or method of any one of embodiments 274-354, wherein -[-L^{LD}-R^{LD})ₐ]_{b} is

[chemical structure]

409. The composition or method of any one of embodiments 274-354, wherein -[-L^{LD}(R^{LD})ₐ]_{b} is

[chemical structure]

410. The composition or method of any one of embodiments 274-354, wherein -[-L^{LD}-(R^{LD})ₐ]_{b} is

[chemical structure]

411. The composition or method of any one of embodiments 274-354, wherein -[-L^{LD}-(R^{LD})ₐ]_{b} is

[chemical structure]

412. The composition or method of any one of embodiments 382-411, wherein X is O.
413. The composition or method of any one of embodiments 382-411, wherein X is S.
414. The composition or method of embodiment 412, wherein —O—P(O)(X⁻)— connects to 5′-O— of A^{c} to form a phosphate linkage.
415. The composition or method of embodiment 412, wherein —O—P(O)(X⁻)— connects to 3′-O— of A^{c} to form a phosphate linkage.
416. The composition or method of embodiment 413, wherein —O—P(O)(X⁻)— connects to 5′-O— of A^{c} to form a phosphorothioate linkage.
417. The composition or method of embodiment 413, wherein —O—P(O)(X⁻)— connects to 3′-O— of A^{c} to form a phosphorothioate linkage.
418. The composition or method of embodiment 416 or 417, wherein the phosphorothioate linkage is chirally controlled.
419. The composition or method of embodiment 416 or 417, wherein the phosphorothioate linkage is chirally controlled and is Sp.
420. The composition or method of embodiment 416 or 417, wherein the phosphorothioate linkage is chirally controlled and is Rp.
421. The composition or method of any one of the preceding embodiments, wherein at least 0.5%, 1%, 2%, 3%, 4%, 5%, 6%, 7%, 8%, 9%, 10%, 20%, 30%, 40%, 50%, 60%, 70%, 75%, 80%, 81%, 82%, 83%, 84%, 85%, 86%, 87%, 88%, 89%, 90%, 91%, 92%, 93%, 94%, 95%, 96%, 97%, 97% or 99% of the oligonucleotides that have the base sequence of the particular oligonucleotide type, defined by 1) base sequence; 2) pattern of backbone linkages; 3) pattern of backbone chiral centers; and 4) pattern of backbone phosphorus modifications, are oligonucleotides of the particular oligonucleotide type.
422. The composition or method of any one of the preceding embodiments, wherein at least 10% of the oligonucleotides that have the base sequence of the particular oligonucleotide type, defined by 1) base sequence; 2) pattern of backbone linkages; 3) pattern of backbone chiral centers; and 4) pattern of backbone phosphorus modifications, are oligonucleotides of the particular oligonucleotide type.
423. The composition or method of any one of the preceding embodiments, wherein at least 0.5%, 1%, 2%, 3%, 4%, 5%, 6%, 7%, 8%, 9%, 10%, 20%, 30%, 40%, 50%, 60%, 70%, 75%, 80%, 81%, 82%, 83%, 84%, 85%, 86%, 87%, 88%, 89%, 90%, 91%, 92%, 93%, 94%, 95%, 96%, 97%, 97% or 99% of the oligonucleotides that have the base sequence, pattern of backbone linkages, and pattern of backbone phosphorus modifications of the particular oligonucleotide type, defined by 1) base sequence; 2) pattern of backbone linkages; 3) pattern of backbone chiral centers; and 4) pattern of backbone phosphorus modifications, are oligonucleotides of the particular oligonucleotide type.
424. The composition or method of any one of the preceding embodiments, wherein at least 10% of the oligonucleotides that have the base sequence, pattern of backbone linkages, and pattern of backbone phosphorus modifications of the particular oligonucleotide type, defined by 1) base sequence; 2) pattern of backbone linkages; 3) pattern of backbone chiral centers; and 4) pattern of backbone phosphorus modifications, are oligonucleotides of the particular oligonucleotide type.
425. The composition or method of any one of the preceding embodiments, wherein the composition is a pharmaceutical composition comprising one or more pharmaceutically acceptable salts of the oligonucleotides.
426. The composition or method of any one of the preceding embodiments, wherein the composition is a pharmaceutical composition comprising one or more sodium salts of the oligonucleotides.
427. The composition or method of any one of the proceeding embodiments, wherein the composition further comprises one or more other therapeutic agents.
428. A method of generating a set of spliced products from a target transcript, the method comprising steps of:
[1772] contacting a splicing system containing the target transcript with an oligonucleotide composition of one of the previous embodiments in an amount, for a time, and under conditions sufficient for a set of spliced products to be generated that is different from a set generated under reference conditions selected from the group consisting of absence of the composition, presence of a reference composition, and combinations thereof.
   429. A method for treating a disease, comprising administering to a subject a composition of any one of the preceding embodiments.
   430. The method of any one of the preceding embodiments, wherein the disease is Duchenne muscular dystrophy.
   431. A method of identifying and/or characterizing an oligonucleotide composition, the method comprising steps of:
[1773] providing at least one composition of any one of the preceding embodiments;
[1774] assessing splicing pattern of a transcript relative to a reference composition.
   432. An oligonucleotide described in any one of the preceding embodiments or a salt thereof.

### EXAMPLES

[1775] Non-limiting examples are provided below. A person of ordinary skill in the art appreciates that other compositions and methods can similarly be prepared and performed in accordance with the present disclosure.

### Example 1. Synthesis of turbinaric acid and 2-cyanoethyl ((6Z,9Z,28Z,31Z)-heptatriaconta-6,9,28,31-tetraen-19-yl) diisopropylphosphoramidite

[chemical structure]

### Synthesis of Turbinaric Acid: (4E,8E,12E,16E)-4,8,13,17,21-pentamethyldocosa-4,8,12,16,20-pentaenoic acid. First-step, synthesis of 2-hydroxy-3-bromosqualene

[1777] To a solution of squalene (30.03 g, 73.1 mmol) in THF (210 mL), water (35 mL) was added and then a small amount of THF was added dropwise to obtain a clear solution under Argon. N-bromosuccinimide (15.62 g, 88 mmol) was added portion-wise at 0° C. and the reaction mixture was stirred at 0° C. for 30 minutes and at room temperature for 3 hrs. The solvent was removed under reduced pressure, and brine (500 mL) was added and extracted with EtOA (100 mL×5). The organic layer was dried over anhydrous sodium sulfate and concentrated to give a residue, which was purified by ISCO (220 g gold silica gel catridge) eluting with hexane to 50% EtOAc in hexane (product was come out at 10-20% EtOAc in hexane) to give 2-hydroxy-3-bromosqualene (9.92 g, 19.54 mmol, 26.7% yield) as a pale yellowish oil. ¹H NMR (400 MHz, Chloroform-d) δ 5.24-5.05 (m, 5H), 3.98 (dd, J=11.3, 1.9 Hz, 1H), 2.35-2.32 (m, 1H), 2.16-1.90 (m, 18H), 1.85-1.70 (m, 1H), 1.67 (d, J=1.4 Hz, 3H), 1.60 (bs, 15H), 1.34 (s, 3H), 1.32 (s, 3H). MS (ESI), 551.1 and 553.3 (M+HCOO)⁻.

### Second Step, Synthesis of 2,2-dimethyl-3-((3E,7E,11E,15E)-3,7,12,16,20-pentamethylhenicosa-3,7,11,15,19-pentaen-1-yl)oxirane

[1778] To a solution of 2-hydroxy-3-bromosqualene (9.72 g, 19.15 mmol) in MeOH (360 mL), K₂CO₃ (5.29 g, 38.3 mmol) was added and the reaction mixture was stirred at room temperature for 2 hrs, filtered and then concentrated under reduced pressure. Then 300 mL EtOAc was added, and filtered, concentrated to give 2,3-oxidosqualene (8.38 g, 19.64 mmol, 100% yield) a colorless oil. ¹H NMR (400 MHz, Chloroform-d) δ 5.20-5.04 (m, 5H), 2.70 (t, J=7.0 Hz, 1H), 2.20-1.95 (m, 20H), 1.67 (s, 3H), 1.61 (s, 3H), 1.59 (bs, 15H), 1.29 (s, 3H), 1.25 (s, 3H).

### Third Step, Synthesis of (4E,8E,12E,16E)-4,8,13,17,21-pentamethyldocosa-4,8,12,16,20-pentaenal

[1779] To a solution of periodic acid (7.79 g, 34.2 mmol) in water (28 mL) at 0° C., a solution of 2,3-oxidosqualene (8.10 g, 18.98 mmol) in dioxane (65 mL) was added. The reaction mixture was stirred at room temperature for 2 hrs. Water (150 mL) was added and extracted with EtOAc (3×100 mL). The organic layer are dried over anhydrous sodium sulfate and concentrated under reduced pressure to give a residue, which was purified by ISCO (120 g gold silica gel catridge) eluting with hexane to 10% EtOAc in hexane (product come out at 5-7% EtOAc in hexane to give (4E,8E,12E,16E)-4,8,13,17,21-pentamethyldocosa-4,8,12,16,20-pentaenal (5.80 g, 15.08 mmol, 79% yield) as a colorless oil. ¹H NMR (400 MHz, Chloroform-d) δ 9.74 (t, J=2.0 Hz, 1H), 5.18-5.04 (m, 5H), 2.50 (td, J=7.5, 2.0 Hz, 2H), 2.31 (t, J=7.5 Hz, 2H), 2.13-1.92 (m, 16H), 1.67 (s, 3H), 1.61 (s, 3H), 1.59 (bs, 12H).

### Fourth Step, Synthesis of Turbinaric Acid

[1780] Sulfuric acid (8.2 mL) followed by sodium dichromate dihydrate (4.42 g, 14.82 mmol) was added to HPLC water (80 mL) at 0° C. The above chromic acid solution was added dropwise to a solution of (4Z,8Z,12E,16E)-4,8,13,17,21-pentamethyldocosa-4,8,12,16,20-pentaenal (5.70 g, 14.82 mmol) in ethyl ether (115 mL) at 0° C. The reaction mixture was stirred at 0° C. for 2 hrs. After 2 hrs, TLC showed the reaction was complete (3: 1 hexane/EtOAc). The reaction mixture was diluted with EtOAc (300 mL), washed with brine (100 mL×4), dried over ahydrous, concentrated to give a residue, which was purified by ISCO (80 g silica gel catridge) eluting with DCM to 5% MeOH in DCM to give turbinaric acid as a colorless oil (5.00 g, 84% yield). ¹H NMR (400 MHz, Chloroform-d) δ 5.18-5.07 (m, 5H), 2.44 (t, J=6.5 Hz, 2H), 2.30 (t, J=7.7 Hz, 2H), 2.13-1.93 (m, 16H), 1.67 (s, 3H), 1.59 (bs, 15H); MS (ESI), 399.3 (M−H)—.

### Example 2. Synthesis of 2-cyanoethyl ((6Z,9Z,28Z,31Z)-heptatriaconta-6,9,28,31-tetraen-19-yl) diisopropylphosphoramidite

[chemical structure]

### Synthesis of 2-cyanoethyl ((6Z,9Z,28Z,31Z)-heptatriaconta-6,9,28,31-tetraen-19-yl) diisopropylphosphoramidite. First-Step, Synthesis of (9Z,12Z)-octadeca-9,12-dien-1-yl methanesulfonate (or linoleyl methanesulfonate)

[1782] To a solution of linoleyl alcohol (23.31 ml, 75 mmol) and triethylamine (13.60 ml, 98 mmol) in DCM (150 mL) at 0° C. was added methanesulfonyl chloride (6.39 ml, 83 mmol) dropwise. The reaction mixture was stirred at 0° C. for 30 minutes and at room temperature for 3 hrs. The reaction mixture was diluted with DCM (200 mL), washed with water, sat sodium bicarbonate and brine and dried over ahydrous sodium sulfate. Solvent was concentrated to give linoleyl methanesulfonate (26.17 g, 100% yield) as an yellowish oil. Without further purification, directly use for next step. ¹H NMR (500 MHz, Chloroform-d) δ 5.30-5.41 (m, 4H), 4.22 (t, J=6.6 Hz, 2H), 2.99 (s, 3H), 2.77 (t, J=6.7 Hz, 2H), 2.05 (q, J=6.9 Hz, 4H), 1.74 (p, J=6.7 Hz, 2H), 1.43-1.25 (m, 16H), 0.89 (t, J=6.7 Hz, 3H).

### Second-Step, Synthesis of Linoleyl Bromide

[1783] To a solution of linoleyl methanesulfonate (26 g, 75 mmol) in ether (800 mL) was added Magnesium bromide ethyl etherate (58.5 g, 226 mmol) under Argon. The reaction mixture was stirred at room temperature for 2 hrs. TLC showed the reaction was not completed. Additional magnesium bromide ethyl etherate (14.5 g) was added the reaction mixture and the reaction mixture was stirred at room temperature for 22 hrs. TLC showed the reaction was complete (9/1 hexane/EtOAc). The reaction mixture was filtered, washed with ether (200 mL), hexane (100 mL), concentrated under reduced pressure to give a residue, which was purified by ISCO (200 g gold silica gel catridge) eluted with hexane to 10% EtOAc in hexane to give linoleyl bromide (22.8 g, 69.2 mmol, 92% yield) as a colorless oil. ¹H NMR (500 MHz, Chloroform-d) δ 5.42-5.31 (m, 4H), 3.41 (t, J=6.9 Hz, 2H), 2.77 (t, J=6.6 Hz, 2H), 2.05 (q, J=6.9 Hz, 4H), 1.85 (p, J=6.9 Hz, 2H), 1.43-1.25 (m, 16H), 0.89 (t, J=6.8 Hz, 3H).

### Third-Step, Synthesis of Dilinoleyl Methanol

[1784] To a suspension of Mg (0.897 g, 36.9 mmol) and ether (20 mL) in RB flask was added linoleyl bromide (10.0 g, 30.4 mmol) in ether (25 mL) dropwise while keeping the reaction under gentle reflux by cooling the RB flask in water. The reaction mixture was stirred at 35° C. for 1 hour. To the above reaction mixture at 0° C. was added ethyl formate (1.013 g, 13.68 mmol) in ether (30 mL) dropwise for 10 minutes and the reaction mixture was stirred at room temperature for 1.5 hrs. The reaction mixture was cooled in ice bath, quenched with water (30 mL), treated with 10% H₂SO₄ (150 mL) until the solution became homogeneous and the layer was separated. The aqueous layer was extracted with ether (200 mL×2). The solvent was evaporated under reduced pressure to give a residue, which was re-dissolved in THF (50 mL) and 1 N NaOH (30 mL). The reaction mixture was stirred at 40° C. for 5 hrs. TLC showed the reaction was not complete. 1.5 g NaOH was added to the reaction mixture and the reaction mixture was continually stirred at 40° C. for overnight. The reaction mixture was extracted with ether (2×), dried over ahydrous sodium sulfate, concentrated to give a residue, which was purified by ISCO (120 g gold silica gel catridge) eluting with hexane to 10% EtOAc in hexane to give dilinoleyl methanol (5.16 g, 9.76 mmol, 71.3% yield) as a colorless oil. ¹H NMR (500 MHz, Chloroform-d) δ 5.41-5.30 (m, 8H), 3.58 (s, 1H), 2.77 (t, J=6.7 Hz, 4H), 2.05 (q, J=6.9 Hz, 8H), 1.49-1.25 (m, 40H), 0.89 (t, J=6.8 Hz, 6H).

### Fourth-Step, 2-cyanoethyl ((6Z,9Z,28Z,31Z)-heptatriaconta-6,9,28,31-tetraen-19-yl) diisopropylphosphoramidite

[1785] To a solution of dilinoleyl methanol (2.5 g, 4.73 mmol) in anhdrous dichloromethane (30 mL) at room temperature was added DIPEA (4.12 ml, 23.63 mmol) and 3-(chloro(diisopropylamino)phosphino)propanenitrile (1.180 ml, 5.67 mmol). The reaction mixture was stirred at room temperature for 2 hours. The reaction mixture was added EtOAc (300 mL), washed with sat sodium bicarbonate, dried over ahydrous sodium sulfate, and concentrated under reduced pressure to give a residue, which was purified by ISCO (40 g gold silica gel catridge) eluting with hexane to 5% EtOAc in hexane containing 5% TEA to give 2-cyanoethyl (6Z,9Z,28Z,31Z)-heptatriaconta-6,9,28,31-tetraen-19-yl diisopropylphosphoramidite (2.97 g, 4.07 mmol, 86% yield) as a colorless oil. ¹H NMR (500 MHz, Chloroform-d) δ 5.30-5.41 (m, 8H), 3.85-3.72 (m, 3H), 3.59 (dp, J=10.2, 6.8 Hz, 2H), 2.77 (t, J=6.8 Hz, 4H), 2.61 (t, J=6.6 Hz, 2H), 2.05 (q, J=7.1 Hz, 8H), 1.60-1.46 (m, 4H), 1.42-1.27 (m, 36H), 1.18 (dd, J=6.8, 3.0 Hz, 12H), 0.89 (t, J=6.8 Hz, 6H). ³¹P NMR (202 MHz, Chloroform-d) δ 147.68.

### Example 3. Lipid Conjugation of WV-942 Amino Linker

[1786] General route for conjugation of lipids with C6-amino linked WV-942 (SEQ ID NO: 2423) is exemplified in the following Scheme (Scheme 1).

[chemical structure]

[1787] Structures of various lipid carboxylic acids and alcohols used for conjugation is depicted below:

[chemical structure]

[chemical structure]

[1788] General Procedure for Conjugation of Lipids with C6-Amino Linked WV-942.

[1789] A mixture of the lipid acid (55 μmol), HATU (50 μmol), Diisopropylethylamine (100 μmol) and NMP (500 μl) was shaken well at room temperature for 10 minutes, in a 3 ml plastic vial. This activated acid was pipetted into a plastic vial containing the CPG (5 μmol, CPG is linked to amino linked oligo). The contents of the vial was thoroughly mixed and shaken well for 12 hours. After this time the supernatant NMP was removed carefully. The CPG was washed with acetonitrile (1 ml×3) and dried in a speed vac. A 1:1 mixture (1 ml) of ammonium hydroxide and methyl amine (AMA) was added and heated at 35° C. for 1 hour with intermittent shaking. After 1 hour, the CPG was transferred into a small filtration cartridge, filtered, washed with DMSO (500 μl×2) and washed with water (1 ml×3). Filtrate and washings were combined and diluted to 10 ml using water. This solution was cooled to zero degrees celsius and neutralized with glacial acetic acid until pH of the solution reached 7.5. Crude product was analyzed by UV spectrometer, reverse phase HPLC and LC-MS. Purification of the crude product was done by RP HPLC.

TABLE 5
(Amount of CPG, Lipid acid, HATU, DIPEA and NMP used for the
coupling reactions).

| | | | | DIPEA | |
|---|---|---|---|---|---|
| | | | | (MW = 129) | |
| | CPG | Acid | HATU (50 μmol | d = 0.726 | |
| EXP# | (5 μmol) | [55 μmol] | (MW = 379.24) | (100 μmol) | NMP |
| 1 | 70.5 | Lauric acid (MW = 200.32) | 19 mg | 18 μL | 500 μL |
| | | 11.01 mg | | | |
| 2 | 70.5 | Myristic Acid (MW = 228.38) | 19 mg | 18 μL | 500 μL |
| | | 12.56 mg | | | |
| 3 | 70.5 | Palmitic acid | 19 mg | 18 μL | 500 μL |
| | | (MW = 256.26) | | | |
| | | 14.1 mg | | | |
| 4 | 70.5 | Stearic acid (MW = 284.27) | 19 mg | 18 μL | 500 μL |
| | | 15.63 mg | | | |
| 5 | 70.5 | Oleic acid (MW = 282.47) | 19 mg | 18 μL | 500 μL |
| | | 15.53 g | | | |
| 6 | 70.5 | Linolenic acid (MW = 280.45) | 19 mg | 18 μL | 500 μL |
| | | 15.4 mg | | | |
| 7 | 70.5 | α-Linoleic acid (MW = 278.44) | 19 mg | 18 μL | 500 μL |
| | | 15.3 mg | | | |
| 8 | 70.5 | γ-Linoleic acid (MW = 278.44) | 19 mg | 18 μL | 500 μL |
| | | 15.3 mg | | | |
| 9 | 70.5 | cis-DHA (MW = 328.24) | 19 mg | 18 μL | 500 μL |
| | | 18.05 mg | | | |
| 10 | 70.5 | Turbinaric acid(MW = 400.36) | 19 mg | 18 μL | 500 μL |
| | | 22 mg | | | |

[1790] After HPLC purification each fraction was analyzed by RP HPLC and LC-MS.

[1791] Pure fractions were combined and solvent was removed under vacuum (speed vaac). Residue was dissolved in water and desalted (Triethyl ammonium ion was replaced with sodium ion) on a C-18 cartridge. Solvent was removed on a speed vaac and the residue was filtered through a centrifugal filter (Amicon Ultra-15 by Millipore), lyophilized and analyzed.

| | Conjugated | | Amount | |
|---|---|---|---|---|
| Oligo (Wave#) | Acid | Total ODs | (μmol) | Amount (mg) |
| WV2578 | Lauric Acid | 287 | 1.40 | 9.79 |
| WV2579 | Myristic Acid | 331 | 1.62 | 11.29 |
| WV2580 | Palmitic Acid | 268 | 1.31 | 9.14 |
| WV2581 | Stearic Acid | 265 | 1.30 | 9.04 |
| WV2582 | Oleic Acid | 262 | 1.28 | 8.94 |
| WV2583 | Linoleic Acid | 120 | 0.59 | 4.09 |
| WV2584 | α-Linolenic Acid | 285 | 1.39 | 9.72 |
| WV2585 | γ-Linolenic Acid | 297 | 1.45 | 10.13 |
| WV2586 | cis-DHA | 274 | 1.34 | 9.35 |
| WV2587 | Turbinaric acid | 186 | 0.91 | 6.35 |
| WV2588 | Dilinoleyl* | 345 | 1.69 | 11.77 |

*Synthesized on a solid support.

### Example 4. In Vitro Efficacy of Oligonucleotides Conjugated to Lipids

[1792] Cell Treatments and RNA Extraction

[1793] Primary human myoblasts from a patient with (deletion exon 48-50), DL 589.2 (deletion exon 51-55) were seeded into 12-well-plate pre-coated with matrigel (BD Biosciences) with density of 60×10³ cells per well in muscle cell proliferation medium (PromoCell GmbH, Heidelberg, Germany) at 37° C. with 5% CO₂. The next day, proliferation medium was replaced with muscle differentiation medium with 5% horse serum containing 10 μM oligos indicated in FIG. 1 and Table 1.

[1794] The oligonucleotide, which is identical to Drisapersen, has the sequence: 5′-mU*mC*mA*mA*mG*mG*mA*mA*mG*mA*mU*mG*mG*mC*mA*mU*mU*mU*mC*mU-3′, wherein * indicates a stereorandom phosphorothioate; and m indicates a 2′—OMe. WV-942 was conjugated with a lipid, as indicated in Table 1, on the 5′ end of the oligonucleotide.

TABLE 5
Lipids conjugated to biologically active agent, oligonucleotide WV-942.

| Oligonucleotide | Conjugated Acid |
|---|---|
| WV-942 | — |
| WV-2578 | Lauric acid |
| WV-2579 | Myristic Acid |
| WV-2580 | Palmitic acid |
| WV-2581 | Stearic acid |
| WV-2582 | Oleic acid |
| WV-2583 | Linoleic acid |
| WV-2584 | Alpha-Linolenic acid |
| WV-2585 | Gamma-Linolenic acid |
| WV-2586 | cis-DHA |
| WV-2587 | Turbinaric acid |
| WV-2588 | Dilinoleyl |

[1795] Cells were differentiated for 4 days. Differentiation medium was then removed from each well and replaced with 500 μl of Trizol. Total RNA was extracted with 300 μl of phenol/chloroform, precipitated with 250 ul isopropanol, washed with 800 μl of 75% ethanol, and finally dissolved in 50 μl RNase free water.

[1796] Procedure of Nested PCR and Taqman Assay for DMD Skipping

[1797] Total cellular RNA was first reverse-transcribed into cDNA using the High-Capacity RNA-to-cDNA™ Kit from ThermoFisher Scientific following the protocol provided by the vendor.

[1798] For nested PCR, resulting cDNA was amplified sequentially using two sets of primers for nested PCR. PCR products were examined and visualized on agarose gels.

[1799] For the Taqman assay, skipped and unskipped transcripts in the cDNA were pre-amplified for 14 cycles using TaqMan® PreAmp Master Mix from ThermoFisher Scientific following the protocol provided. The amplification procedures are 95° C. for 10 min, then 14 cycles of 95° C. for 15 sec and 60° C. for 4 min. Preamplified cDNA was then analyzed for 40 cycles on LightCycler system (95° C. for 10 min, followed by 40 cycles of 95° C. for 15 sec and 60° C. for 1 min). Reactions contained 5 μl preamplified cDNA, 0.5 μl of skipped or unskipped Taqman assay and 0.5 μl Taqman assay for endogenous control, 4 μl water and 10 μl of Taman universal PCR master mix in a total volume of 20 μl. Data was analyzed using the LightCycler program to calculate Ct values. Endogenous controls include GAPDH, as well as muscle differentiation markers such as MyoD, desmin, myogenin, utrophin, myosin heavy chain and DMD itself.

Custom TaqMan MGB probes and primers were synthesized by Life Technologies using the following sequences.

Unskipped (exon 51)
Forward:

(SEQ ID NO: 2424)

GTGATGGTGGGTGACCTTGAG
Reverse:

(SEQ ID NO: 2425)

TTTGGGCAGCGGTAATGAG
Probe:

(SEQ ID NO: 2426)

CAAGCAGAAGGCAACAA
Skipped (exon 51)
Forward:

(SEQ ID NO: 2427)

TGAAAATAAGCTCAAGCAGACAAATC
Reverse:

(SEQ ID NO: 2428)

GACGCCTCTGTTCCAAATCC
Probe:

(SEQ ID NO: 2429)

CAGTGGATAAAGGCAACA

Results are shown in FIG. 1.

### Example 5. In Vivo Delivery of Compositions Comprising a Biologically Active Agent and a Lipid

[1800] In Vivo Oligo Treatment

[1801] Five weeks old mdx mice were dosed subcutaneously at 5 ml/kg at concentration of 10 mg/ml on Day 1. On Day 4, all animals were subjected to both terminal blood and tissue collection. Plasma was aliquoted into polupropylene tubes and stored at −70° C. For tissue collections, all animals were euthanized via CO₂ asphyxiation, and perfused using PBS. The following tissues were collected: liver, kidney, spleen, heart, thoracic diaphragm, gastrocnemius, quadriceps and triceps. Tissues were snap-frozen (in liquid nitrogen) and stored at −70° C.

[1802] Procedure:

[1803] In vivo biodistribution of the Control unconjugated ASO WV-942 or WV-942 conjugated to seven different lipids (WV-2588, -2581, -2582, -2584, -2585, -2586, -2587) was tested following a single subcutaneous administration to C57BL/10ScSn-Dmd^{mdx}/J male mice 5 weeks of age (Jackson Laboratory, Stock#001801). The study design is described in Table 1.

[1804] Animals were housed at 18° C. to 26° C. and 30% to 70% humidity two per cage in polycarbonate cages during acclimation and throughout the study. Housing included Beta Chip® and Enviro-Dri contact bedding. Standard chow and water were supplied ad libitum.

[1805] The study complied with all applicable sections of the Final Rules of the Animal Welfare Act regulations (Code of Federal Regulations, Title 9), the Public Health Service Policy on Humane Care and Use of Laboratory Animals from the Office of Laboratory Animal Welfare, and the Guide for the Care and Use of Laboratory Animals from the National Research Council. The protocol and any amendments or procedures involving the care or use of animals in this study were reviewed and approved by the Testing Facility Institutional Animal Care and Use Committee before the initiation of such procedures.

TABLE 6
Study design.

| | | | | Number | | | |
|---|---|---|---|---|---|---|---|
| | | | Dosing | of | Test Article | Dose | |
| | Test | Dose, | Route/Dosing | animals | Concentration, | Volume, | Termination |
| Group | Article | mg/kg | Day | (males) | mg/ml | ml/kg | Day |
| 1 | PBS | — | SC, Day 1 | 3 | 0 | 5 | Day 3 |
| 2 | WV- | 50 | SC, Day 1 | 3 | 10 | 5 | Day 3 |
| | 942 | | | | | | |
| 3 | WV- | 50 | SC, Day 1 | 3 | 10 | 5 | Day 3 |
| | 2588 | | | | | | |
| 4 | WV- | 50 | SC, Day 1 | 3 | 10 | 5 | Day 3 |
| | 2581 | | | | | | |
| 5 | WV- | 50 | SC, Day 1 | 3 | 10 | 5 | Day 3 |
| | 2582 | | | | | | |
| 6 | WV- | 50 | SC, Day 1 | 3 | 10 | 5 | Day 3 |
| | 2584 | | | | | | |
| 7 | WV- | 50 | SC, Day 1 | 3 | 10 | 5 | Day 3 |
| | 2585 | | | | | | |
| 8 | WV- | 50 | SC, Day 1 | 3 | 10 | 5 | Day 3 |
| | 2586 | | | | | | |
| 9 | WV- | 50 | SC, Day 1 | 3 | 10 | 5 | Day 3 |
| | 2587 | | | | | | |

[1806] Animals were euthanized via CO₂ asphyxiation 48 hours (±1 hour) after subcutaneous injection on Day 1. All animals were perfused using PBS. The following collected tissues (liver, kidney 2×, spleen, heart, thoracic diaphragm, gastrocnemius, quadriceps, and triceps) were rinsed briefly with PBS, gently blotted dry, snap frozen (liquid N2) in polypropylene tubes and storaged at −70° C. until processing for further analysis.

[1807] Oligo Quantification

[1808] Briefly, each mouse tissue was weighted and lysed in tissue lysis buffer.

[1809] Hybridization Assay to Detect ASO: Sandwich

[1810] Methods:

[1811] Probe:

Capture probe:

(SEQ ID NO: 2430)

/5AmMC12/A + GA + AA + TG + CC + A
Detection probe:

(SEQ ID NO: 2431)

T + CT + TC + CT + TG + A/3Bio/

[1812] Plate:

[1813] Coat Pierce® Amine-binding, Maleic Anhydride 96-Well Plates, with diluted Capture probe at 500 nM in 2.5% NaHCO3, at 37 C for at least 1 hour (or 4 C overnight). After wash with PBST (1×PBS+0.1% Tween-20), block in 5% fat-free milk/PBST at 37 C for >1 hour.

[1814] Tissue Sample Preparation

[1815] Weight tissue pieces, add 4 volume of lysis buffer to tissue to achieve 0.2 g tissue/ml, in tissue lysis buffer (IGEPAL 0.5%, 100 mM NaCl, 5 mM EDTA, 10 mM Tris pH8, protease K 300 ug/ml). The homogenate was generated by Bullet Blender (NextAdvance).

[1816] Standard Curve:

[1817] Dilute Test Article into non-treated blank tissue homogenates (matrix) at 10-50 ug/ml (50-250 ug/g tissue). The standard was further serial diluted 1:1 with matrix for 8 points to form standard curve series.

[1818] Hybrid-ELISA:

[1819] Dilute Standard Curve samples, treated tissue homogenates 100-500 times with hybridization buffer (4 M Guanidine; 0.33% N-Lauryl Sarcosine; 25 mM Sodium Citrate; 10 mM DTT). 20 ul of diluted tissue samples were mixed with 180 ul of detection probe diluted in PBST at 333 nM. Samples were denatured using following condition: 65 C, 10 min; 95 C, 15 min; 4 C, ∞. Add 50 ul/well denatured samples into coated 96 wells. Incubate at 4 C for overnight. Wash plate 3 times with PBST. Add 1:2000 dilution of streptavidin-AP in PBST. Incubate at room temperature for 1 hour. Wash plate 5 times x 2 cycles with PBST on Molecular Device plate wash machine. Add 100 ul/well AttoPhos substrates. Incubate for 10 min, read plate at Molecular Device M5 in fluorescence channel: Ex435 nm, Em555 nm. Take another read at 20 min. The ASO concentration is calculated against Standard Curve by using either linear curve fit or 4-parameter curve fit.

[1820] An example protocol is illustrated in FIG. 8.

### Example 6. Example Assay for Measuring TLR9 Agonist and Antagonist Activities

[1821] Various assays can be utilized to assay TLR9 activities of provided compositions in accordance with the present disclosure. In one example human TLR9 report assay, HEK-Blue™ TLR9 cells which stably overexpress the human TLR9 gene and an NF-kB inducible secreted embryonic alkaline phosphatase (SEAP) were obtained from Invivogen (San Diego, Calif., USA). Oligonucleotides at indicated concentrations were plated into 96-well-plates in the final volume of 20 mL in water. 4×10⁴ HEK-Blue TLR9 cells were added to each well in a volume of 180 mL in SEAP detection medium. In certain experiments, oligonucleotides were added in the presence or absence of various concentrations of TLR9 agonists (e.g., oligonucleotide ODN2006), and the cultures were continued for 16 h. At the end of the treatment, OD was measured at 655 nM. The results are expressed as fold change in NF-κB activation over phosphate buffered saline (PBS)-treated cells.

### Example 7. Example In Vivo Delivery of Provided Compounds and Compositions

[1822] Example In Vivo Oligonucleotide Treatment:

[1823] Five-week-old mdx mice were dosed i.v. or subcutaneously at 5 mL/kg at concentration of 10 mg/mL on Day 1. On Day 4 (or other days as desired), all animals were subjected to both terminal blood and tissue collection. Plasma was aliquoted into polupropylene tubes and stored at −70° C. For tissue collections, all animals were euthanized via CO₂ asphyxiation, and perfused using PBS. The following tissues were also collected: liver, kidney, spleen, heart, thoracic diaphragm, gastrocnemius, quadriceps and triceps. Tissues were snap-frozen (in liquid nitrogen) and stored at −70° C.

[1824] Example Procedure:

[1825] In vivo biodistribution of the control oligonucleotide WV-942 and oligonucleotides to be tested (e.g., WV-2588, WV-2581, WV-2582, WV-2584, WV-2585, WV-2586, WV-2587, etc.) was tested following a single subcutaneous administration to C57BL/10ScSn-Dmd^{mdx}/J male mice 5 weeks of age (Jackson Laboratory, Stock#001801). Animals were housed at 18° C. to 26° C. and 30% to 70% humidity two per cage in polycarbonate cages during acclimation and throughout the study. Housing included Beta Chip® and Enviro-Dri contact bedding. Standard chow and water were supplied ad libitum. The study complied with all applicable sections of the Final Rules of the Animal Welfare Act regulations (Code of Federal Regulations, Title 9), the Public Health Service Policy on Humane Care and Use of Laboratory Animals from the Office of Laboratory Animal Welfare, and the Guide for the Care and Use of Laboratory Animals from the National Research Council. The protocol and any amendments or procedures involving the care or use of animals in this study were reviewed and approved by the Testing Facility Institutional Animal Care and Use Committee before the initiation of such procedures.

[1826] Animals were euthanized via CO₂ asphyxiation 48 hours (+1 hour) after subcutaneous injection on Day 1. All animals were perfused using PBS. The following collected tissues (liver, kidney 2×, spleen, heart, thoracic diaphragm, gastrocnemius, quadriceps, and triceps) were rinsed briefly with PBS, gently blotted dry, snap frozen (liquid N₂) in polypropylene tubes and stored at −70° C. until processing for further analysis.

[1827] Oligonucleotide Quantification:

[1828] Briefly, each mouse tissue was weighted and lysed in tissue lysis buffer.

[1829] Hybridization assay to detect ASO: Sandwich

[1830] Methods:

[1831] Probe: Capture probe: /5AmMC12/A+GA+AA+TG+CC+A (SEQ ID NO: 2430); Detection probe: T+CT+TC+CT+TG+A/3Bio/(SEQ ID NO: 2431)

[1832] Plate: Coat Pierce® Amine-binding, Maleic Anhydride 96-Well Plates, with diluted Capture probe at 500 nM in 2.5% NaHCO₃, at 37° C. for at least 1 hour (or 4° C. overnight). After wash with PBST (1×PBS+0.1% Tween-20), block in 5% fat-free milk/PBST at 37° C. for >1 hour.

[1833] Tissue sample preparation: Weigh tissue pieces, add 4 volumes of lysis buffer to tissue to achieve 0.2 g tissue/mL, in tissue lysis buffer (IGEPAL 0.5%, 100 mM NaCl, 5 mM EDTA, 10 mM Tris pH8, protease K 300 μg/mL). The homogenate was generated by Bullet Blender (NextAdvance).

[1834] Standard Curve: Dilute Test Article into non-treated blank tissue homogenates (matrix) at 10-50 μg/mL (50-250 μg/g tissue). The standard was further serial diluted 1:1 with matrix for 8 points to form standard curve series.

[1835] Hybrid-ELISA: Dilute Standard Curve samples, treated tissue homogenates 100-500 times with hybridization buffer (4 M Guanidine; 0.33% N-Lauryl Sarcosine; 25 mM Sodium Citrate; 10 mM DTT). 20 μL of diluted tissue samples were mixed with 180 μL of detection probe diluted in PBST at 333 nM. Samples were denatured using following condition: 65° C., 10 min; 95° C., 15 min; 4° C., ∞. Add 50 μL/well denatured samples into coated 96 wells. Incubate at 4° C. for overnight. Wash plate 3 times with PBST. Add 1:2000 dilution of streptavidin-AP in PBST. Incubate at room temperature for 1 hour. Wash plate 5 times x 2 cycles with PBST on Molecular Device plate wash machine. Add 100 μL/well AttoPhos substrates. Incubate for 10 min, read plate at Molecular Device M5 in fluorescence channel: Ex435 nm, Em555 nm. Take another read at 20 min. Oligonucleotide concentration is calculated against Standard Curve by using either linear curve fit or 4-parameter curve fit.

[1836] Example test results were presented in the Figures, e.g., 31A-31D, demonstrating that provided oligonucleotides comprising lipid moieties have improved properties (e.g., distribution, metabolism, etc.).

### Example 8. Example Synthesis of 1,7,14-trioxo-12,12-bis((3-oxo-3-((3-(4-sulfamoylbenzamido)propyl)amino)propoxy)methyl)-1-(4-sulfamoylphenyl)-10-oxa-2,6,13-triazaoctadecan-18-oic acid

[chemical structure]

[chemical structure]

[chemical structure]

[1838] Step 1:

[1839] A solution of di-tert-butyl 3,3′-((2-amino-2-((3-(tert-butoxy)-3-oxopropoxy)methyl)propane-1,3-diyl)bis(oxy))dipropanoate (4.0 g, 7.91 mmol) and dihydro-2H-pyran-2,6(3H)-dione (0.903 g, 7.91 mmol) in THF (40 mL) was stirred at 50° C. for 3 hrs and at rt for 3 hrs. LC-MS showed desired product. Solvent was evaporated to give 5-((9-((3-(tert-butoxy)-3-oxopropoxy)methyl)-2,2,16,16-tetramethyl-4,14-dioxo-3,7,11,15-tetraoxaheptadecan-9-yl)amino)-5-oxopentanoic acid, which was directly used for next step without purification.

[1840] Step 2:

[1841] To a solution of 5-((9-((3-(tert-butoxy)-3-oxopropoxy)methyl)-2,2,16,16-tetramethyl-4,14-dioxo-3,7,11,15-tetraoxaheptadecan-9-yl)amino)-5-oxopentanoic acid (4.90 g, 7.91 mmol) and (bromomethyl)benzene (1.623 g, 9.49 mmol) in DMF was added anhydrous K₂CO₃ (3.27 g, 23.73 mmol). The mixture was stirred at 40° C. for 4 hrs and at room temperature for overnight. Solvent was evaporated under reduced pressure. The reaction mixture was diluted with EtOAc, washed with water, dried over anhydrous sodium sulfate, and concentrated under reduced pressure to give a residue, which was purified by ISCO eluting with 10% EtOAc in hexane to 50% EtOAc in hexane to give di-tert-butyl 3,3′-((2-(5-(benzyloxy)-5-oxopentanamido)-2-((3-(tert-butoxy)-3-oxopropoxy)methyl)propane-1,3-diyl)bis(oxy))dipropanoate (5.43 g, 7.65 mmol, 97% yield) as a colorless oil. ¹H NMR (400 MHz, Chloroform-d) δ 7.41-7.28 (m, 5H), 6.10 (s, 1H), 5.12 (s, 2H), 3.72-3.60 (m, 12H), 2.50-2.38 (m, 8H), 2.22 (t, J=7.3 Hz, 2H), 1.95 (p, J=7.4 Hz, 2H), 1.45 (s, 27H); MS (ESI), 710.5 (M+H)+.

[1842] Step 3:

[1843] A solution of di-tert-butyl 3,3′-((2-(5-(benzyloxy)-5-oxopentanamido)-2-((3-(tert-butoxy)-3-oxopropoxy)methyl)propane-1,3-diyl)bis(oxy))dipropanoate (5.43 g, 7.65 mmol) in formic acid (50 mL) was stirred at room temperature for 48 hrs. LC-MS showed the reaction was not complete. Solvent was evaporated under reduced pressure. The crude product was re-dissolved in formic acid (50 mL) and was stirred at room temperature for 6 hrs. LC-MS showed the reaction was complete. Solvent was evaporated under reduced pressure, co-evaporated with toluene (3×) under reduced pressure, and dried under vacuum to give 3,3′-((2-(5-(benzyloxy)-5-oxopentanamido)-2-((2-carboxyethoxy)methyl)propane-1,3-diyl)bis(oxy))dipropanoic acid (4.22 g, 7.79 mmol, 100% yield) as a white solid. ¹H NMR (500 MHz, DMSO-d₆) δ 12.11 (s, 3H), 7.41-7.27 (m, 5H), 6.97 (s, 1H), 5.07 (s, 2H), 3.55 (d, J=6.4 Hz, 6H), 2.40 (t, J=6.3 Hz, 6H), 2.37-2.26 (m, 2H), 2.08 (t, J=7.3 Hz, 2H), 1.70 (p, J=7.4 Hz, 2H); MS (ESI), 542.3 (M+H)⁺.

[1844] Step 4:

[1845] To a solution of 3,3′-((2-(5-(benzyloxy)-5-oxopentanamido)-2-((2-carboxyethoxy)methyl)propane-1,3-diyl)bis(oxy))dipropanoic acid (4.10 g, 7.57 mmol) and HOBt (4.60 g, 34.1 mmol) in DCM (60 mL) and DMF (15 mL) at 0° C. was added tert-butyl (3-aminopropyl)carbamate (5.94 g, 34.1 mmol), EDAC HCl salt (6.53 g, 34.1 mmol) and DIPEA (10.55 mL, 60.6 mmol). The reaction mixture was stirred at 0° C. for 15 minutes and at room temperature for 20 hrs. LC-MS showed the reaction was not complete. EDAC HCl salt (2.0 g) and tert-butyl (3-aminopropyl)carbamate (1.0 g) was added into the reaction mixture. The reaction mixture was stirred at room temperature for 4 hrs. Solvent was evaporated to give a residue, which was dissolved in EtOAc (300 mL), washed with water (1×), saturated sodium bicarbonate (2×), 10% citric acid (2×) and water, dried over sodium sulfate, and concentrated to give a residue which was purified by ISCO (80 g gold catridge) eluting with DCM to 30% MeOH in DCM to give benzyl 15,15-bis(13,13-dimethyl-5,11-dioxo-2,12-dioxa-6,10-diazatetradecyl)-2,2-dimethyl-4,10,17-trioxo-3,13-dioxa-5,9,16-triazahenicosan-21-oate 5 (6.99 g, 6.92 mmol, 91% yield) as a white solid. ¹H NMR (500 MHz, Chloroform-d) δ 7.35 (t, J=4.7 Hz, 5H), 6.89 (s, 3H), 6.44 (s, 1H), 5.22 (d, J=6.6 Hz, 3H), 5.12 (s, 2H), 3.71-3.62 (m, 12H), 3.29 (q, J=6.2 Hz, 6H), 3.14 (q, J=6.5 Hz, 6H), 2.43 (dt, J=27.0, 6.7 Hz, 8H), 2.24 (t, J=7.2 Hz, 2H), 1.96 (p, J=7.5 Hz, 2H), 1.69-1.59 (m, 6H), 1.43 (d, J=5.8 Hz, 27H); MS (ESI): 1011.5 (M+H)+.

[1846] Step 5:

[1847] To a solution of benzyl 15,15-bis(13,13-dimethyl-5,11-dioxo-2,12-dioxa-6,10-diazatetradecyl)-2,2-dimethyl-4,10,17-trioxo-3,13-dioxa-5,9,16-triazahenicosan-21-oate (1.84 g, 1.821 mmol) in DCM (40 mL) was added 2,2,2-trifluoroacetic acid (7.02 mL, 91 mmol). The reaction mixture was stirred at room temperature for overnight. Solvent was evaporated to give benzyl 5-((1,19-diamino-10-((3-((3-aminopropyl)amino)-3-oxopropoxy)methyl)-5,15-dioxo-8,12-dioxa-4,16-diazanonadecan-10-yl)amino)-5-oxopentanoate as a colorless oil. MS (ESI), 710.6 (M+H)⁺.

[1848] Step 6:

[1849] To a solution of 4-sulfamoylbenzoic acid (1.466 g, 7.28 mmol) in DCM (40 mL) was added HATU (2.77 g, 7.28 mmol) followed by benzyl 5-((1,19-diamino-10-((3-((3-aminopropyl)amino)-3-oxopropoxy)methyl)-5,15-dioxo-8,12-dioxa-4,16-diazanonadecan-10-yl)amino)-5-oxopentanoate (1.293 g, 1.821 mmol) in DMF (4.0 mL). The mixture was stirred at room temperature for 5 hrs. Solvent was evaporated under reduced pressure to give a residue, which was purified by ISCO (40 g gold column) eluting with DCM to 50% MeOH in DCM to give benzyl 1,7,14-trioxo-12,12-bis((3-oxo-3-((3-(4-sulfamoylbenzamido)propyl)amino)-propoxy)methyl)-1-(4-sulfamoylphenyl)-10-oxa-2,6,13-triazaoctadecan-18-oate (0.36 g, 0.286 mmol, 16% yield). ¹H NMR (400 MHz, DMSO-d₆) δ 8.60 (t, J=5.6 Hz, 3H), 7.96-7.81 (m, 15H), 7.44 (s, 6H), 7.35-7.23 (m, 5H), 7.04 (s, 1H), 5.02 (s, 2H), 3.50 (t, J=6.9 Hz, 6H), 3.48 (s, 6H), 3.23 (q, J=6.6 Hz, 6H), 3.06 (q, J=6.6 Hz, 6H), 2.29 (t, J=7.4 Hz, 2H), 2.24 (t, J=6.5 Hz, 6H), 2.06 (t, J=7.4 Hz, 2H), 1.69-1.57 (m, 8H).

[1850] Step 7:

[1851] To a round bottom flask flushed with Ar was added 10% Pd/C (80 mg, 0.286 mmol) and EtOAc (15 mL). A solution of benzyl 1,7,14-trioxo-12,12-bis((3-oxo-3-((3-(4-sulfamoylbenzamido)propyl)amino)propoxy)methyl)-1-(4-sulfamoylphenyl)-10-oxa-2, 6,13-triazaoctadecan-18-oate (360 mg) in methanol (15 mL) was added followed by diethyl(methyl)silane (0.585 g, 5.72 mmol) dropwise. The mixture was stirred at room temperature for 3 hrs. LC-MS showed the reaction was complete. The reaction was diluted with EtOAc, and filtered through celite, washed with 20% MeOH in EtOAc, and concentrated under reduced pressure to give 1,7,14-trioxo-12,12-bis((3-oxo-3-((3-(4-sulfamoylbenzamido)propyl)-amino)propoxy)methyl)-1-(4-sulfamoylphenyl)-10-oxa-2,6,13-triazaoctadecan-18-oic acid (360 mg, 100% yield) as a white solid. ¹H NMR (400 MHz, DMSO-d₆) δ 8.60 (t, J=5.6 Hz, 3H), 7.94-7.81 (m, 15H), 7.44 (s, 6H), 7.04 (s, 1H), 3.50 (t, J=6.9 Hz, 6H), 3.48 (s, 6H), 3.23 (q, J=6.6 Hz, 6H), 3.06 (q, J=6.6 Hz, 6H), 2.24 (t, J=6.4 Hz, 6H), 2.14 (t, J=7.5 Hz, 2H), 2.05 (t, J=7.4 Hz, 2H), 1.66-1.57 (m, 8H); MS (ESI), 1170.4 (M+H)⁺.

### Example 9. Example Synthesis of Amidites for Mod030-Mod033

[1852] To a solution of lauryl alcohol (5.2 g, 28 mmol) in 60 mL dry DCM, under an atmosphere of argon, at room temperature was added DIPEA (18 g, 140 mmol) and stirred for 5 minutes. To this solution was added 2-cyanoethyl N,N-diisopropylchlorophosphoramidite (7.9 g, 33.5 mmol) dropwise and stirred for 4 hours. Solvent from the reaction mixture was evaporated under reduced pressure, diluted with 300 mL ethyl acetate, washed with sat. NaHCO₃ and dried over anhydrous sodium sulfate. Removal of solvent and column chromatography over silica gel (80 g regular silica, 0-30% ethyl acetate in hexane containing 5% triethyl amine) using ISCO afforded the product. Weight of product obtained: 3.8 g (35%). ¹H NMR (500 MHz; CDCl₃): δ 3.88-3.76 (m, 2H), 3.68-3.55 (m, 4H), 2.62 (t, 2H), 1.62-1.35 (m, 2H), 1.32-1.28 (m, 18H), 1.19-1.17 (m, 12H), 0.87 (t, 3H). ³¹P NMR (202.4 MHz; CDCl₃): δ 147.2 (s). Amidites for Mod031, Mod032 and Mod033 were prepared using the same procedure. These amidites were used as the last amidite in the synthesis cycle to prepare oligonucleotides comprising Mod030-Mod033.

### Example 10. Example Preparation of Acid for Mod024

[chemical structure]

[1854] GlucNAc acid 1 (WO 2014/025805 A1) (1.88 g, 4.2 mmol) and HOBT (0.73 g, 5.4 mmol) was stirred in anhydrous DMF-DCM mixture (11+15 mL) under nitrogen at room temperature for 10 minutes. HBTU (2.05 g, 5.4 mmol) was added followed by DIPEA (2.17 g, 16.8 mmol) at 10° C. To this solution was added tri-amine salt 2 (WO 2014/025805 A1) (1.38 g, 1.2 mmol) and stirred overnight. Solvent was removed under vacuum and the residue was dissolved in ethyl acetate (200 mL). To this solution was added 100 ml of a mixture of sat. ammonium chloride, sat. sodium chloride, sat. sodium bicarbonate and water (1:1:1:1). The ethyl acetate layer was turbid initially. After thoroughly shaking the layers got separated. Aqueous layer was extracted with ethyl acetate (×2). Combined organic fractions were washed with brine and dried over anhydrous sodium sulfate. Solvent removal under reduced pressure afforded 490 mg of crude product. This product was purified by CC on an ISCO machine. The eluent was DCM-Methanol (0-20% methanol in DCM). Amount of product obtained was 1.26 g (50%). LC-MS (+ mode): 1768 (M-1GlucNAc), 1438 (M-2 GlucNAc), 1108 (M-3 GlucNAc), 1049 (M/2+1).

[chemical structure]

[1855] To a solution of benzyl ester 4 (0.25 g, 0.119 mmol) in 7 mL dry methanol, under an atmosphere of argon, 10% Pd/C (50 mg) was added followed by 1.5 mL (9.4 mmol) triethylsilane (TES) drop wise. A vigorous reaction set in and the RM was stirred for 3 hours. LC-MS analysis of the product indicates completion of reaction. The RM was filtered over celite and solvent was removed under vacuum. The crude product was triturated (×3) with ether-methanol (3:1) mixture and dried under vacuum. This product 5 was used for conjugation with oligonucleotide chains without further purification, and after conjugation the hydroxyl groups were deprotected, for example, during cleavage and/or deprotection of oligonucleotides to incorporate Mod024. If desired, a number of protocols can be utilized to deprotect the hydroxyl groups in 5 to provide the acid with deprotected hydroxyl groups. ¹H NMR (500 MHz, DMSO-D6): δ 7.90 (3H, d, J=10 Hz), 7.80 (t, 3H), 7.70 (t, 3H), 5.03 (t, 3H), 4.77 (t, 3H), 4.54 (3H, d, J=10 Hz), 4.14 (3H, d, J₁=9 Hz, J₂=5 Hz), 3.97-3.93 (m, 3H), 3.79-3.74 (m, 3H), 3.69-3.61 (m, 6H), 3.51-3.47 (m, 3H), 3.40-3.35 (m, 3H), 3.31 (d, 3H, J=9 Hz), 2.98 (m, 12H), 2.23 (t, 3H), 2.13 (t, 3H), 2.01-1.99 (m, 3H), 1.97 (s, 9H), 1.92 (s, 9H), 1.86 (s, 9H), 1.71 (s, 9H), 1.49-1.32 (m, 22H), 1.18 (br s, 12H). Mod026 were incorporated using similar strategies.

### Example 11. Example Procedure for Conjugation—Preparing Oligonucleotide Chains with Amino Groups

[1856] As appreciated by a person having ordinary skill in the art, various technologies, e.g., linkers, methods, functional groups, etc. can be utilized to prepare provided oligonucleotides in accordance with the present disclosure, including those comprising lipid moieties and/or targeting components. Below are example procedures for preparing oligonucleotides with amino groups for incorporating various moieties, e.g., lipid moieties, targeting components, etc. A person of ordinary skill in the art appreciates that various technologies can be used to conjugate lipids with other types of biologically active agents, e.g., small molecules, peptides, proteins, etc., including methods, reagents, etc. widely known and used in the art, in accordance with the present disclosures.

[1857] “On Support” Conjugation Strategy

[1858] Preparation of 5′-amino-modified oligonucleotides for “on support” conjugation was carried out using MMT-amino C6 CE phosphoramidite (ChemGenes Corporation catalog No. CLP-1563 or Glen Research catalog No. 10-1906), which was added as the last phosphoramidite and coupled to 5′-OH of the oligonucleotide chain on solid support using oligonucleotide synthesis chemistry. After coupling, the newly formed linkage was optionally oxidized to provide a phosphodiester linkage if desired using, for example, tert-butyl hydroperoxide (e.g., 1.1 M in 20:80 decane/dichloromethane), I₂ (e.g., in pyridine/water, THF/pyridine/water, etc.), etc., depending on the oligonucleotide synthesis chemistry. When a phosphorothioate linkage was desired, PolyOrg Sulfa (e.g., 0.1 M in acetonitrile) or DDTT (e.g., 0.1 M in pyridine) was used for sulfurization. The MMT protecting group was then removed while the oligonucleotide was on support with deblocking reagent (e.g., 3% trichloroacetic acid in dichloromethane, 3% dichloroacetic acid in toluene, etc.) until the yellow color was no longer observed. Various compounds, e.g., fatty acids, sugar acids, etc. were then coupled, and optionally followed by cleavage from the support, deprotection and/or purification.

[1859] “In Solution” Conjugation Strategy

[1860] Preparation of 5′-amino-modified oligonucleotides for “in solution” conjugation strategy was carried out using TFA-amino C6 CED phosphoramidite (ChemGenes Corporation catalog No. CLP-1553 or Glen Research catalog No. 10-1916), which was added as the last phosphoramidite and coupled to 5′-OH of the oligonucleotide chain on solid support using oligonucleotide synthesis chemistry. After coupling, the newly formed linkage was optionally oxidized to provide a phosphodiester linkage if desired using, for example, tert-butyl hydroperoxide (e.g., 1.1 M in 20:80 decane/dichloromethane), I₂ (e.g., in pyridine/water, THF/pyridine/water, etc.), etc., depending on the oligonucleotide synthesis chemistry. When a phosphorothioate linkage was desired, PolyOrg Sulfa (e.g., 0.1 M in acetonitrile) or DDTT (e.g., 0.1 M in pyridine) was used for sulfurization. The amine-modified oligonucleotides were then cleaved from the support, deprotected and purified to provide products with free amino groups for conjugation. Usually the TFA group was removed during cleavage and deprotection of the oligonucleotides. The oligonucleotides were then utilized for conjugation

### Example 12. Example Procedure for Conjugation on Solid Support

[1861] In some embodiments, lipid conjugation to biologically active agents can be performed using solid support. As appreciated by a person having ordinary skill in the art, a number of widely known and practiced technologies, e.g., reagents, methods, etc., can be utilized to prepare provided oligonucleotide compositions, including those comprising lipid moieties, in accordance with the present disclosure. Two example schemes are provided in the present and following examples for illustration of conjugation of lipids, targeting components, etc. to oligonucleotides. In some embodiments, R^{LD}—COOH is a fatty acid as described herein (prepared and/or commercially available) to provide R^{LD} as illustrated in provided oligonucleotides, e.g., certain example oligonucleotides in Table 4. In some embodiments, R^{LD}—COOH is an acid comprising targeting component (prepared and/or commercially available) as described herein to provide R^{LD} as illustrated in provided oligonucleotides, e.g., certain example oligonucleotides in Table 4.

[1862] Example procedure for conjugation on solid support:

[chemical structure]

[1863] In an example procedure, a mixture of a lipid acid (1 μmol, 1 eq.), HATU (0.9 eq), diisopropylethylamine (10 eq) and NMP (500 μl) was shaken well at room temperature for 10 minutes, in a 3 mL plastic vial. This activated acid was pipetted into a plastic vial containing oligonucleotides (e.g., see example above) on solid support (0.09 μmol, 0.9 eq). The contents of the vial was thoroughly mixed and shaken well for 12 hours. After this time the supernatant NMP was removed carefully. The solid support was washed with acetonitrile (1 mL×3) and dried in a speed vac. A 1:1 mixture (1 mL) of ammonium hydroxide and methyl amine (AMA) was added and heated at 35° C. for 1 hour with intermittent shaking. After 1 hour, the CPG was transferred into a small filtration cartridge, filtered, washed with DMSO (500 μl×2) and washed with water (1 mL×3). Filtrate and washings were combined and diluted to 10 mL using water. This solution was cooled to 0° C. and neutralized with glacial acetic acid until pH of the solution reached 7.5. (Alternatively the dried solid support can be treated with 35% NH₄OH at 60° C. for 12 hours, cooled, filtered and neutralized with glacial acetic acid. For oligos containing fluoro group at 2′ position, a mixture of 35% ammonium hydroxide and ethanol (3:1) was used with temperature not exceeding 40° C.). Crude product was analyzed by UV spectrometer, reverse phase HPLC and LC-MS. Purification of the crude product was done by RP-HPLC. After HPLC purification each fraction was analyzed by RP-HPLC and LC-MS. Pure fractions were combined and solvent was removed under vacuum (speed vac). Residue was dissolved in water and desalted (Triethyl ammonium ion was replaced with sodium ion) on a C-18 cartridge. Solvent was removed on a speed vaac and the residue was filtered through a centrifugal filter (Amicon Ultra-15 by Millipore), lyophilized and analyzed.

[1864] For example, for synthesis of WV-2578, a mixture of lauric acid (11.01 mg, 0.0549 mmol), HATU (19 mg, 0.050 mmol) and diisopropylethyl amine (18 μL, 0.1 mmol) was dissolved in 500 μL of dry NMP and shaken well for five minutes. This activated acid was pipetted into a plastic vial containing oligonucleotides on solid support (70.5 mg, 0.005 mmol). The contents of the vial was thoroughly mixed and shaken well for 12 hours. After this time supernatant NMP was removed carefully. The solid support was washed with acetonitrile (1 mL×3) and dried in a speed vac. A 1:1 mixture (1 mL) of ammonium hydroxide and methyl amine (AMA) was added and heated at 35° C. for 1 hour with intermittent shaking. After 1 hour, the CPG was transferred into a small filtration cartridge, filtered, washed with DMSO (500 μL×2) and washed with water (1 mL×3). Filtrate and washings were combined and diluted to 10 mL using water. This solution was cooled to 0° C. and neutralized with glacial acetic acid until pH of the solution reached 7.5. Purification of the crude product was done by RP-HPLC. After HPLC purification each fraction was analyzed by RP-HPLC and LC-MS. Pure fractions were combined and solvent was removed under vacuum (speed vac). Residue was dissolved in water and desalted (triethyl ammonium ion was replaced with sodium ion) on a C-18 cartridge. Solvent was removed on a speed vac and the residue was filtered through a centrifugal filter (Amicon Ultra-15 by Millipore), lyophilized and analyzed. Average mass of WV2578 calculated: 7355, found (deconvoluted mass):7358. Additional examples include:

| EXP* | CPG (5 μmol) | Acid (55 μmol) |
|---|---|---|
| 1 | 70.5 | Lauric acid (W = 200.32) 11.01 mg |
| 2 | 70.5 | Myristic Acid (MW = 228.38) 12.56 mg |
| 3 | 70.5 | Palmitic acid (MW = 256.26) 14.1 mg |
| 4 | 70.5 | Stearic acid (MW = 284.27) 15.63 mg |
| 5 | 70.5 | Oleic acid (MW = 282.47) 15.53 g |
| 6 | 70.5 | Linolenic acid (MW = 280.45) 15.4 mg |
| 7 | 70.5 | α-Linolenic acid (MW = 278.44) 15.3 mg |
| 8 | 70.5 | γ-Linolenic acid (MW = 278.44) 15.3 mg |
| 9 | 70.5 | cis-DHA (W = 328.24) 18.05 mg |
| 10 | 70.5 | Turbinaric acid (MW = 400.36) 22 mg |

*HATU (50 μmol, MW = 379.24, 19 mg), DIPEA (MW = 129, d = 0.726, 100 μmol, 18 μL), NMP (500 μL). Example products include (Total ODs and Amount of lipid conjugates after purification; some may be described in previous examples):

| | | | Amount | Amount |
|---|---|---|---|---|
| Oligonucleotide | Conjugated Acid | Total ODs | (μmol) | (mg) |
| WV2578 | Lauric Acid | 287 | 1.40 | 9.79 |
| WV2579 | Myristic Acid | 331 | 1.62 | 11.29 |
| WV2580 | Palmitic Acid | 268 | 1.31 | 9.14 |
| WV2581 | Stearic Acid | 265 | 1.30 | 9.04 |
| WV2582 | Oleic Acid | 262 | 1.28 | 8.94 |
| WV2583 | Linoleic Acid | 120 | 0.59 | 4.09 |
| WV2584 | α-Linolenic Acid | 285 | 1.39 | 9.72 |
| WV2585 | γ-Linolenic Acid | 297 | 1.45 | 10.13 |
| WV2586 | cis-DHA | 274 | 1.34 | 9.35 |
| WV2587 | Turbinaric acid | 186 | 0.91 | 6.35 |
| WV2588 | Dilinoleyl* | 345 | 1.69 | 11.77 |

*Synthesized on a solid support; last cycle using 2-cyanoethyl ((6Z,9Z,28Z,31Z)-heptatriaconta-6,9,28,31-tetraen-19-yl) diisopropylphosphoramidite.

### Example 13. Example Procedure for Conjugation in Solution

[1865] In some embodiments, lipid conjugation with biologically active agents can be performed in solution. In some embodiments, provided oligonucleotides comprising lipid moieties were prepared in solution phase.

[1866] Example procedure for conjugation in liquid phase:

[chemical structure]

[1867] In an example procedure, a mixture of the lipid acid (1 eq.), HATU (1 eq.) and DIPEA (10 eq.) was mixed well in dry AcCN (10 mL) and kept for 10 minutes. This activated acid was added to the oligonucleotide (5 μmol) in water (5 mL) and mixed well on a vortex. This reaction was shaken for 1 hour. After 1 hour completion of the reaction was checked by LC-MS (usually the reaction is complete in 1 hour; if not, more acid-HATU complex can be added to drive the reaction to completion). Acetonitrile and water was removed under vacuum on a speed vac. The solid obtained was treated with 35% ammonium hydroxide (15 mL) and shaken at 60° C. for 12 hours; for 2′ fluro oligonucleotides a 3:1 mixture of 35% ammonium hydroxide and ethanol was used for deprotection). After 12 hours solvent was removed under vacuum and diluted with water (15 mL), analyzed by LC-MS and RP-HPLC. Crude product was then purified by RP-HPLC and desalted.

[1868] For example, for synthesis of WV-3546, turbinaric acid (7 mg, 0.0174 mmol), HATU (6.27 mg, 0.0165 mmol) and DIPEA (22.2 mg, 0.172 mmol) was mixed well in dry AcCN (10 mL) and kept for 5 minutes in a 40 mL plastic vial. This activated acid was added to oligonucleotides in 3.77 mL water (80 mg, 0.0117 mmol) and mixed well on a vortex. This reaction was shaken for 2 hours. After 2 hours completion of the reaction was checked by LC-MS (reaction was complete). Acetonitrile and water was removed under vacuum on a speed vac. The solid obtained was treated with ammonia: ethanol mixture (3:1, 15 mL) and shaken at 40° C. for 12 hours. After 12 hours solvent was removed under vacuum and diluted with water (˜15 mL) and analyzed by LC-MS. Crude product was purified by RP-HPLC (50 mM triethyl ammonium acetate in water-acetonitrile system (0-70% acetonitrile in 45 minutes), X Bridge preparative C8 (19×250 mm column))_. Average mass of WV3546 calculated: 7295. Mass found (deconvoluted mass): 7295.

### Example 14. Example Synthesis of MMT-C6-Amino DPSE-L Amidite

[chemical structure]

[1870] Preparation of Chlorooxazaphospholidine:

[1871] L-DPSE (37.1 g, 119 mmol) was dried by azeotropic evaporation with anhydrous toluene (150 mL) at 35° C. in a rotaevaporator and left in high vacuum for overnight. Then a solution of this dried L-DPSE (37.1 g) and 4-methylmorpholine (26.4 mL, 24.31 g, 240 mmol) dissolved in anhydrous toluene (150 mL) was added to an ice-cold solution of trichlorophosphine (16.51 g, 10.49 mL, 120 mmol) in anhydrous toluene (110 mL) placed in three neck round bottomed flask through cannula under Argon (start Temp: 0.6° C., Max: temp 14° C., 25 min addition) and the reaction mixture was stirred at 0° C. for 40 min. After that the precipitated white solid was filtered by vacuum under argon using spacial filter tube (Chemglass: Filter Tube, 24/40 Inner Joints, 80 mm OD Medium Frit, Airfree, Schlenk). The solvent was removed by rotaevaporator under argon at low temperature (25° C.) followed by dried under vacuum overnight (˜15 h) and the oily chlorooxazaphospholidine obtained was used for the next step.

[1872] MMT-C6-Amino DPSE-L Amidite:

[1873] 6-(monomethoxytritylamino)hexan-1-ol (7.0 g, 17.97 mmol) was first dried by azeotropic evaporation by anhydrous toluene (50 ml) and dried under vacuum for overnight. Then the dried 6-(monomethoxytritylamino)hexan-1-ol was dissolved in anhydrous THF (80 mL) and added triethylamine (9.0 g, 90 mmol) and then the reaction solution was cooled to −70° C. To this cooled solution was added chlorooxazaphospholidine (6.76 g, 17.97 mmol) dissolved in anhydrous THF(50 mL) over 10 min. After the reaction mixture slowly warmed to room temperature (˜1 h), TLC indicated complete conversion of starting material. Then the reaction mixture was filtered carefully under vacuum/argon using the fitted filtration tube to remove precipitated solid, and washed with THF (80 mL). The solution was evaporated at 25° C. and the resulting oily residue was dissolved in Hexane-CH₂Cl₂ mixture with 5% TEA and purified using ISCO Combi-Flash system 220 g silica column (which was pre-de-activated with 3 CV MeOH, then equilibrated with ethyl acetate (5% TEA) 3 CV), with Hexane-EtOAc mixture (5% TEA). Pure fractions were collected and concentrated, dried overnight to afford MMT-C6-amino DPSE-L amidite as a colorless oily liquid. Yield: 8.0 g (62%). MS: calculated: 728.38; found by LCMS analysis at +Ve ion mode m/z: 729.54 (M⁺ ion), 747.50 (M⁺+18, H₂O). ¹H-NMR (500 MHz, CDCl₃): δ 7.58-7.43 (m, 8H), 7.41-7.31 (m, 6H), 7.31-7.23 (m, 6H), 7.17 (t, J=7.2 Hz, 2H), 6.81 (d, J=8.7 Hz, 2H), 4.82 (dt, J=8.7, 5.7 Hz, 1H), 3.78 (s, 3H), 3.77-3.73 (m, 1H), 3.54 (qt, J=11.0, 5.2 Hz, 2H), 2.54 (q, J=7.2 Hz, 3H), 2.11 (t, J=7.0 Hz, 2H), 1.64-1.57 (m, 4H), 1.51-1.35 (m, 6H), 1.26 (q, J=9.9, 8.0 Hz, 2H), 1.04 (t, J=7.1 Hz, 2H), 0.67 (s, 3H). ¹³C NMR (500 MHz, CDCl₃) δ 157.87, 146.73, 146.67, 138.63, 136.89, 136.43, 134.71, 134.57, 134.48, 129.88, 129.46, 129.42, 128.66, 128.05, 127.96, 127.87, 127.81, 126.17, 113.13, 78.14, 78.07, 77.48, 77.43, 77.22, 76.97, 70.45, 68.03, 68.01, 63.50, 63.40, 55.22, 47.46, 47.17, 46.40, 43.69, 34.79, 31.34, 31.07, 27.19, 27.09, 26.04, 25.98, 17.60, 11.78, −3.17. ³¹P-NMR (500 MHz, CDCl₃): δ 154.27 (92.18%), 157.68 (3.56%), 146.35 (4.26%).

### Example 15. Example Preparation of WV-4107

[1874] Oligonucleotides were prepared using conditions for WV-3473 with all protecting groups and auxiliaries on and remained on solid support (if cleaved and deprotected, would provide WV-3473) using provided oligonucleotide technologies. In an example procedure, DPSE chemistry and GE Primer Support 5G (2.1 g), and the following cycles were used:

| | | | volume | waiting |
|---|---|---|---|---|
| step | operation | reagents and solvent | per cycle | time |
| 1 | detritylation | 3% DCA in toluene | ~150 mL | ~6 min |
| 2 | coupling | 0.175M monomer in MeCN or | 21 mL | 8 min |
| | | 20% isobutyronitrile in MeCN + 0.6M | | |
| | | CMIMT in MeCN | | |
| 3 | capping | 20% Ac₂O, 30% 2,6-lutidine in | 23 mL | 1.5 min |
| | | MeCN + 20% MeIm in MeCN | | |
| 4 | oxidation or | 1.1M TBHP in DCM-decane | 44 mL or | 2 min or 6 min |
| | sulfurization | or 0.1M POS in MeCN | 39 mL | |

[1875] After the last cycle, a portion of the oligonucleotides can be cleaved and deprotected for QC or other purposes. In an example procedure the oligonucleotides on support were washed with 6 column volumes of 20% diethylamine in acetonitrile for 15 min followed by an acetonitrile wash. The support was dried and then incubated in 1 M triethylamine hydrofluoride in 3:1 dimethylformamide/water for 1-1.5 h at 50° C. The sample was filtered and washed with acetonitrile and dried. The support was then incubated overnight at 40° C. in 3:1 ammonium hydroxide/ethanol.

[1876] For preparation of WV-4107, after the last cycle the DMT protecting group was removed using 3% dichloroacetic acid in toluene. During the coupling step, MMT-C6-amino DPSE-L amidite (0.175 M in isobutyronitrile) and CMIMT activator (0.6 M in acetonitrile) were added with a contact time of 8 min. The percent volume of activator was 55%. Capping was performed with 20% 1-methylimidazole in acetonitrile and 20/30/50 acetic anhydride/2,6-lutidine/acetonitrile. Sulfurization was performed using 0.1 M PolyOrg Sulfa in acetonitrile.

[1877] The MMT protecting group was then removed while the oligonucleotide was on support with deblocking reagent (3% dichloroacetic acid in toluene) until the yellow color was no longer observed, providing WV-4191. Stearic acid was then coupled to the amine using described procedure above. The oligonucleotides on support were washed with 20% diethylamine in acetonitrile for 30 min at room temperature followed by an acetonitrile wash. The support was dried and then incubated in 1 M triethylamine hydrofluoride in 3:1 dimethylformamide/water for 1-1.5 h at 50° C. The sample was filtered and washed with acetonitrile and dried. The support was then incubated overnight at 40° C. in 3:1 ammonium hydroxide/ethanol. The crude product was further purified using RP-HPLC to provide WV-4107.

### Example 16. Example Preparation of Oligonucleotides with Mod021

[1878] Oligonucleotide was synthesized at a scale of 10 μmol using standard cyanoethyl phosphoramidite chemistry and was left on support with protecting groups using cycle conditions for WV-942 (if cleaved and deprotected, would provide WV-942). The DMT protecting group was removed using 3% trichloroacetic acid in dichloromethane. The lipid amidite was then added to the 5′ end of the oligonucleotide on the synthesizer. During the coupling step, equal volumes of lipid amidite (e.g., 0.1 M in isobutyronitrile) and 5-ethylthio tetrazole (e.g., 0.5 M in acetonitrile) were added with a contact time of, e.g., 5 min. The coupling step was optionally repeated a second time. Sulfurization was performed using 0.1 M DDTT in pyridine. The oligonucleotide was cleaved and deprotected using AMA condition (ammonium hydroxide/40% aqueous methylamine 1:1 v/v) to provide WV-2588.

### Example 17. Example Preparation of Oligonucleotides with Mod030, Mod031, Mod032 and Mod033

[1879] Oligonucleotides were synthesized using cyanoethyl phosphoramidite chemistry as for WV-2735 and were left on support with the protecting group on (if cleaved and deprotected, would provide WV-2735). The 5′-DMT protecting group was removed using 3% trichloroacetic acid in dichloromethane. The lipid amidites were then added to the 5′ end of the oligonucleotide on the synthesizer. During the coupling step, equal volumes of lipid amidite (0.1M in isobutyronitrile or dichloromethane) and 5-ethylthio tetrazole (0.5M in acetonitrile) were added with a contact time of 10 min. The coupling step was repeated again. Oxidation was performed using 0.02 M I₂ in THF/pyridine/water. The oligonucleotides were de-protected with 20% diethylamine in acetonitrile wash followed by an acetonitrile wash. The oligonucleotides were cleaved from the support and further de-protected in ammonium hydroxide at 50° C. overnight.

[1880] Product oligonucleotides were characterized in various chemical analyses, e.g., UV, HPLC-MS, etc., (for example MS data, see Table 6) and biological assays, e.g., those described herein. Following similar procedures and/or using widely known and practiced technologies in the art, other example provided oligonucleotides were or can be readily prepared and characterized in accordance with the present disclosure.

### EQUIVALENTS

[1881] Having described some illustrative embodiments of the disclosure, it should be apparent to those skilled in the art that the foregoing is merely illustrative and not limiting, having been presented by way of example only. Numerous modifications and other illustrative embodiments are within the scope of one of ordinary skill in the art and are contemplated as falling within the scope of the disclosure. In particular, although many of the examples presented herein involve specific combinations of method acts or system elements, it should be understood that those acts and those elements may be combined in other ways to accomplish the same objectives. Acts, elements, and features discussed only in connection with one embodiment are not intended to be excluded from a similar role in other embodiments. Further, for the one or more means-plus-function limitations recited in the following claims, the means are not intended to be limited to the means disclosed herein for performing the recited function, but are intended to cover in scope any means, known now or later developed, for performing the recited function.

[1882] Use of ordinal terms such as “first”, “second”, “third”, etc., in the claims to modify a claim element does not by itself connote any priority, precedence, or order of one claim element over another or the temporal order in which acts of a method are performed, but are used merely as labels to distinguish one claim element having a certain name from another element having a same name (but for use of the ordinal term) to distinguish the claim elements. Similarly, use of a), b), etc., or i), ii), etc. does not by itself connote any priority, precedence, or order of steps in the claims. Similarly, the use of these terms in the specification does not by itself connote any required priority, precedence, or order.

[1883] The foregoing written specification is considered to be sufficient to enable one skilled in the art to practice the invention. The present disclosure is not to be limited in scope by examples provided, since the examples are intended as a single illustration of one aspect of the invention and other functionally equivalent embodiments are within the scope of the invention. Various modifications of the invention in addition to those shown and described herein will become apparent to those skilled in the art from the foregoing description and fall within the scope of the appended claims. The advantages and objects of the invention are not necessarily encompassed by each embodiment of the invention.

1-5. (canceled)

6. A chirally controlled oligonucleotide composition comprising a lipid and a plurality of oligonucleotides, which oligonucleotides of the plurality share:
1) a common base sequence;
2) a common pattern of backbone linkages; and
3) a common pattern of backbone phosphorus modifications;
wherein:
b. the composition is chirally controlled in that the plurality of oligonucleotides share the same stereochemistry at one or more chiral internucleotidic linkages;
c. one or more oligonucleotides of the plurality are individually conjugated to a lipid; and
d. one or more oligonucleotides of the plurality are optionally and individually conjugated to a targeting compound or moiety.

7. The composition of claim 6, wherein the oligonucleotide comprises a sequence which is substantially complementary to that of a targeted element in a nucleic acid in a muscle cell in a subject, wherein the targeted element is associated with a muscle disease, disorder, or condition.

8. The composition of claim 7, wherein a muscle disease, disorder, or condition is DMD.

9. The composition of claim 8, wherein the oligonucleotides in the composition provide exon skipping of exon 51 of dystrophin.

10. The composition of claim 6, wherein the plurality of oligonucleotides share the same stereochemistry at five or more chiral internucleotidic linkages.

11. The composition of claim 10, wherein the plurality of oligonucleotides share a common pattern of sugar modification, which comprises 3, 4, 5, 6, 7, 8, 9 or more 2′-F.

12. The composition of claim 10, wherein the plurality of oligonucleotides share a common pattern of sugar modification, which comprises 3, 4, 5, 6, 7, 8, 9 or more consecutive 2′-F.

13. (canceled)

14. The composition of claim 12, wherein the plurality of oligonucleotides have the structure of:
A^{c}-[-L^{LD}-(R^{LD})ₐ]_{b} or [(A^{c})ₐ-L^{LD}]_{b}—R^{LD}, or a salt thereof,
wherein:
A^{c} is an oligonucleotide chain ([H]_{b}—A^{c} is an oligonucleotide);
a is 1-1000;
b is 1-1000;
each L^{LD} is independently a covalent bond or an optionally substituted, C₁-C₈₀ saturated or partially unsaturated aliphatic group, wherein one or more methylene units are optionally and independently replaced by T^{LD} or an optionally substituted group selected from C₁-C₆ alkylene, C₁-C₆ alkenylene, —C≡C—, a C₁-C₆ heteroaliphatic moiety, —C(R′)₂—, -Cy-, —O—, —S—, —S—S—, —N(R′)—, —C(O)—, —C(S)—, —C(NR′)—, —C(O)N(R′)—, —N(R′)C(O)N(R′)—, —N(R′)C(O)—, —N(R′)C(O)O—, —OC(O)N(R′)—, —S(O)—, —S(O)₂—, —S(O)₂N(R′)—, —N(R′)S(O)₂—, —SC(O)—, —C(O)S—, —OC(O)—, and —C(O)O—;
each R^{LD} is independently an optionally substituted, C₁-C₈₀ saturated or partially unsaturated aliphatic group, wherein one or more methylene units are optionally and independently replaced by an optionally substituted group selected from C₁-C₆ alkylene, C₁-C₆ alkenylene, —C≡C—, a C₁-C₆ heteroaliphatic moiety, —C(R′)₂—, -Cy-, —O—, —S—, —S—S—, —N(R′)—, —C(O)—, —C(S)—, —C(NR′)—, —C(O)N(R′)—, —N(R′)C(O)N(R′)—, —N(R′)C(O)—, —N(R′)C(O)O—, —OC(O)N(R′)—, —S(O)—, —S(O)₂—, —S(O)₂N(R′)—, —N(R′)S(O)₂—, —SC(O)—, —C(O)S—, —OC(O)—, and —C(O)O—;
T^{LD} has the structure of: [chemical structure]
W is O, S or Se;
each of X, Y and Z is independently —O—, —S—, —N(-L-R¹)—, or L;
L is a covalent bond or an optionally substituted, linear or branched C₁-C₁₀ alkylene, wherein one or more methylene units of L are optionally and independently replaced by an optionally substituted group selected from C₁-C₆ alkylene, C₁-C₆ alkenylene, —C≡C—, a C₁-C₆ heteroaliphatic moiety, —C(R′)₂—, -Cy-, —O—, —S—, —S—S—, —N(R′)—, —C(O)—, —C(S)—, —C(NR′)—, —C(O)N(R′)—, —N(R′)C(O)N(R′)—, —N(R′)C(O)—, —N(R′)C(O)O—, —OC(O)N(R′)—, —S(O)—, —S(O)₂—, —S(O)₂N(R′)—, —N(R′)S(O)₂— —SC(O)—, —C(O)S—, —OC(O)—, and —C(O)O—;
R¹ is halogen, R, or an optionally substituted C₁-C₅₀ aliphatic wherein one or more methylene units are optionally and independently replaced by an optionally substituted group selected from C₁-C₆ alkylene, C₁-C₆ alkenylene, —C≡C—, a C₁-C₆ heteroaliphatic moiety, —C(R′)₂—, -Cy-, —O—, —S—, —S—S—, —N(R′)—, —C(O)—, —C(S)—, —C(NR′)—, —C(O)N(R′)—, —N(R′)C(O)N(R′)—, —N(R′)C(O)—, —N(R′)C(O)O—, —OC(O)N(R′)—, —S(O)—, —S(O)₂—, —S(O)₂N(R′)—, —N(R′)S(O)₂— —SC(O)—, —C(O)S—, —OC(O)—, and —C(O)O—
each R′ is independently —R, —C(O)R, —CO₂R, or —SO₂R, or:
two R′ are taken together with their intervening atoms to form an optionally substituted aryl, carbocyclic, heterocyclic, or heteroaryl ring;
-Cy- is an optionally substituted bivalent ring selected from phenylene, carbocyclylene, arylene, heteroarylene, and heterocyclylene; and
each R is independently hydrogen, or an optionally substituted group selected from C₁-C₆ aliphatic, carbocyclyl, aryl, heteroaryl, and heterocyclyl.

15. The composition of claim 14, wherein the oligonucleotide comprises at least one phosphorothioate internucleotidic linkage.

16. A method of delivering an oligonucleotide to a muscle cell or tissue in a human subject, comprising:
(a) providing a composition of claim 6; and
(b) administering the composition to the human subject such that the oligonucleotide is delivered to a muscle cell or tissue in the subject.

17. A method of modulating the level of a transcript or gene product of a gene in a cell, the method comprising the step of contacting the cell with a composition of claim 6, wherein the oligonucleotides are capable of modulating the level of the transcript or gene product.

18. A method for treating a sign and/or symptom of a disease, disorder, or condition in a subject selected from cancer, a proliferative disease, disorder, or condition, a metabolic disease, disorder, or condition, an inflammatory disease, disorder, or condition, and a viral infection by providing and administering a composition of claim 6 to the subject.

19. A method of modulating the amount of exon skipping in a cell, the method comprising contacting the cell with a composition of claim 6, wherein the oligonucleotides are capable of modulating the amount of exon skipping.

20. A method of modulating the amount of exon skipping in a cell, the method comprising contacting the cell with a composition of claim 6, wherein the oligonucleotides are capable of modulating the amount of exon skipping of exon 51 of DMD.

21. (canceled)

The application's sequence listing, which the Patent Office published only in electronic form, follows.

SEQUENCE LISTING (2434 sequences)

SEQ ID NO: 1 - RNA, 20 nt, Artificial Sequence
  Description of Artificial Sequence: Synthetic oligonucleotide
ucaaggaagauggcauuucu

SEQ ID NO: 2 - protein, 13 aa, Artificial Sequence
  Description of Artificial Sequence: Synthetic peptide
GRKKRRQRRRPPQ

SEQ ID NO: 3 - DNA, 20 bp, Artificial Sequence
  Description of Artificial Sequence: Synthetic oligonucleotide
gcctcagtctgcttcgcacc

SEQ ID NO: 4 - DNA, 20 bp, Artificial Sequence
  Description of Artificial Sequence: Synthetic oligonucleotide
gcctcagtctgcttcgcacc

SEQ ID NO: 5 - DNA, 13 bp, Artificial Sequence
  Description of Artificial Sequence: Synthetic oligonucleotide
aatcgatcgatcg

SEQ ID NO: 6 - DNA, 20 bp, Artificial Sequence
  Description of Artificial Sequence: Synthetic oligonucleotide
gcctcagtctgcttcgcacc

SEQ ID NO: 7 - DNA, 20 bp, Artificial Sequence
  Description of Artificial Sequence: Synthetic oligonucleotide
gcctcagtctgcttcgcacc

SEQ ID NO: 8 - RNA, 20 nt, Artificial Sequence
  Description of Artificial Sequence: Synthetic oligonucleotide
ggcacaagggcacagacuuc

SEQ ID NO: 9 - DNA, 30 bp, Artificial Sequence
  Description of Artificial Sequence: Synthetic oligonucleotide
ctccaacatcaaggaagatggcatttctag

SEQ ID NO: 10 - RNA, 24 nt, Artificial Sequence
  Description of Artificial Sequence: Synthetic oligonucleotide
cccauuuugugaauguuuucuuuu

SEQ ID NO: 11 - RNA, 22 nt, Artificial Sequence
  Description of Artificial Sequence: Synthetic oligonucleotide
uuguguauuuacccauuuugug

SEQ ID NO: 12 - RNA, 20 nt, Artificial Sequence
  Description of Artificial Sequence: Synthetic oligonucleotide
uauccucugaaugucgcauc

SEQ ID NO: 13 - RNA, 20 nt, Artificial Sequence
  Description of Artificial Sequence: Synthetic oligonucleotide
gguuauccucugaaugucgc

SEQ ID NO: 14 - RNA, 19 nt, Artificial Sequence
  Description of Artificial Sequence: Synthetic oligonucleotide
gagccuuuuuucuucuuug

SEQ ID NO: 15 - RNA, 19 nt, Artificial Sequence
  Description of Artificial Sequence: Synthetic oligonucleotide
uccuuucgucucugggcuc

SEQ ID NO: 16 - RNA, 19 nt, Artificial Sequence
  Description of Artificial Sequence: Synthetic oligonucleotide
cuccucuuucuucuucugc

SEQ ID NO: 17 - RNA, 20 nt, Artificial Sequence
  Description of Artificial Sequence: Synthetic oligonucleotide
cuucgaaacugagcaaauuu

SEQ ID NO: 18 - RNA, 17 nt, Artificial Sequence
  Description of Artificial Sequence: Synthetic oligonucleotide
cuugugagacaugagug

SEQ ID NO: 19 - RNA, 18 nt, Artificial Sequence
  Description of Artificial Sequence: Synthetic oligonucleotide
cagagacuccucuugcuu

SEQ ID NO: 20 - RNA, 18 nt, Artificial Sequence
  Description of Artificial Sequence: Synthetic oligonucleotide
ugcugcugucuucuugcu

SEQ ID NO: 21 - RNA, 19 nt, Artificial Sequence
  Description of Artificial Sequence: Synthetic oligonucleotide
uuguuaacuuuuucccauu

SEQ ID NO: 22 - RNA, 19 nt, Artificial Sequence
  Description of Artificial Sequence: Synthetic oligonucleotide
cgccgccauuucucaacag

SEQ ID NO: 23 - DNA, 15 bp, Artificial Sequence
  Description of Artificial Sequence: Synthetic oligonucleotide
tagatagctatatat

SEQ ID NO: 24 - DNA, 15 bp, Artificial Sequence
  Description of Artificial Sequence: Synthetic oligonucleotide
atagatagctatata

SEQ ID NO: 25 - DNA, 15 bp, Artificial Sequence
  Description of Artificial Sequence: Synthetic oligonucleotide
tatagatagctatat

SEQ ID NO: 26 - DNA, 15 bp, Artificial Sequence
  Description of Artificial Sequence: Synthetic oligonucleotide
atatagatagctata

SEQ ID NO: 27 - DNA, 15 bp, Artificial Sequence
  Description of Artificial Sequence: Synthetic oligonucleotide
gatatagatagctat

SEQ ID NO: 28 - DNA, 12 bp, Artificial Sequence
  Description of Artificial Sequence: Synthetic oligonucleotide
atagatagctat

SEQ ID NO: 29 - DNA, 15 bp, Artificial Sequence
  Description of Artificial Sequence: Synthetic oligonucleotide
agatatagatagcta

SEQ ID NO: 30 - DNA, 12 bp, Artificial Sequence
  Description of Artificial Sequence: Synthetic oligonucleotide
tatagatagcta

SEQ ID NO: 31 - DNA, 15 bp, Artificial Sequence
  Description of Artificial Sequence: Synthetic oligonucleotide
tagatatagatagct

SEQ ID NO: 32 - DNA, 12 bp, Artificial Sequence
  Description of Artificial Sequence: Synthetic oligonucleotide
atatagatagct

SEQ ID NO: 33 - DNA, 15 bp, Artificial Sequence
  Description of Artificial Sequence: Synthetic oligonucleotide
atagatatagatagc

SEQ ID NO: 34 - DNA, 12 bp, Artificial Sequence
  Description of Artificial Sequence: Synthetic oligonucleotide
gatatagatagc

SEQ ID NO: 35 - DNA, 15 bp, Artificial Sequence
  Description of Artificial Sequence: Synthetic oligonucleotide
tatagatatagatag

SEQ ID NO: 36 - DNA, 12 bp, Artificial Sequence
  Description of Artificial Sequence: Synthetic oligonucleotide
agatatagatag

SEQ ID NO: 37 - DNA, 15 bp, Artificial Sequence
  Description of Artificial Sequence: Synthetic oligonucleotide
atatagatatagata

SEQ ID NO: 38 - DNA, 12 bp, Artificial Sequence
  Description of Artificial Sequence: Synthetic oligonucleotide
tagatatagata

SEQ ID NO: 39 - DNA, 15 bp, Artificial Sequence
  Description of Artificial Sequence: Synthetic oligonucleotide
tatatagatatagat

SEQ ID NO: 40 - DNA, 12 bp, Artificial Sequence
  Description of Artificial Sequence: Synthetic oligonucleotide
atagatatagat

SEQ ID NO: 41 - DNA, 12 bp, Artificial Sequence
  Description of Artificial Sequence: Synthetic oligonucleotide
tatagatataga

SEQ ID NO: 42 - DNA, 12 bp, Artificial Sequence
  Description of Artificial Sequence: Synthetic oligonucleotide
atatagatatag

SEQ ID NO: 43 - DNA, 15 bp, Artificial Sequence
  Description of Artificial Sequence: Synthetic oligonucleotide
atagctatatagata

SEQ ID NO: 44 - DNA, 15 bp, Artificial Sequence
  Description of Artificial Sequence: Synthetic oligonucleotide
aaaaaatagctatat

SEQ ID NO: 45 - DNA, 15 bp, Artificial Sequence
  Description of Artificial Sequence: Synthetic oligonucleotide
gttaaaaaaaatagc

SEQ ID NO: 46 - DNA, 15 bp, Artificial Sequence
  Description of Artificial Sequence: Synthetic oligonucleotide
aggaagttaaaaaaa

SEQ ID NO: 47 - DNA, 15 bp, Artificial Sequence
  Description of Artificial Sequence: Synthetic oligonucleotide
aataaaggaagttaa

SEQ ID NO: 48 - DNA, 15 bp, Artificial Sequence
  Description of Artificial Sequence: Synthetic oligonucleotide
aggaaaataaaggaa

SEQ ID NO: 49 - DNA, 15 bp, Artificial Sequence
  Description of Artificial Sequence: Synthetic oligonucleotide
gtgtaaggaaaataa

SEQ ID NO: 50 - DNA, 15 bp, Artificial Sequence
  Description of Artificial Sequence: Synthetic oligonucleotide
attttgtctaaaacc

SEQ ID NO: 51 - DNA, 15 bp, Artificial Sequence
  Description of Artificial Sequence: Synthetic oligonucleotide
gattttgtctaaaac

SEQ ID NO: 52 - DNA, 12 bp, Artificial Sequence
  Description of Artificial Sequence: Synthetic oligonucleotide
ttttgtctaaaa

SEQ ID NO: 53 - DNA, 15 bp, Artificial Sequence
  Description of Artificial Sequence: Synthetic oligonucleotide
tgattttgtctaaaa

SEQ ID NO: 54 - DNA, 12 bp, Artificial Sequence
  Description of Artificial Sequence: Synthetic oligonucleotide
attttgtctaaa

SEQ ID NO: 55 - DNA, 15 bp, Artificial Sequence
  Description of Artificial Sequence: Synthetic oligonucleotide
ttgattttgtctaaa

SEQ ID NO: 56 - DNA, 13 bp, Artificial Sequence
  Description of Artificial Sequence: Synthetic oligonucleotide
gatttttgtctaa

SEQ ID NO: 57 - DNA, 15 bp, Artificial Sequence
  Description of Artificial Sequence: Synthetic oligonucleotide
tttgattttgtctaa

SEQ ID NO: 58 - DNA, 16 bp, Artificial Sequence
  Description of Artificial Sequence: Synthetic oligonucleotide
ttttgattttgtctaa

SEQ ID NO: 59 - DNA, 15 bp, Artificial Sequence
  Description of Artificial Sequence: Synthetic oligonucleotide
ttttgattttgtcta

SEQ ID NO: 60 - DNA, 12 bp, Artificial Sequence
  Description of Artificial Sequence: Synthetic oligonucleotide
tgattttgtcta

SEQ ID NO: 61 - DNA, 12 bp, Artificial Sequence
  Description of Artificial Sequence: Synthetic oligonucleotide
ttgattttgtct

SEQ ID NO: 62 - DNA, 15 bp, Artificial Sequence
  Description of Artificial Sequence: Synthetic oligonucleotide
tttttgattttgtct

SEQ ID NO: 63 - DNA, 12 bp, Artificial Sequence
  Description of Artificial Sequence: Synthetic oligonucleotide
tttgattttgtc

SEQ ID NO: 64 - DNA, 15 bp, Artificial Sequence
  Description of Artificial Sequence: Synthetic oligonucleotide
ctttttgattttgtc

SEQ ID NO: 65 - DNA, 12 bp, Artificial Sequence
  Description of Artificial Sequence: Synthetic oligonucleotide
ttttgattttgt

SEQ ID NO: 66 - DNA, 12 bp, Artificial Sequence
  Description of Artificial Sequence: Synthetic oligonucleotide
tttttgattttg

SEQ ID NO: 67 - DNA, 15 bp, Artificial Sequence
  Description of Artificial Sequence: Synthetic oligonucleotide
cttctttttgatttt

SEQ ID NO: 68 - DNA, 12 bp, Artificial Sequence
  Description of Artificial Sequence: Synthetic oligonucleotide
ctttttgatttt

SEQ ID NO: 69 - DNA, 12 bp, Artificial Sequence
  Description of Artificial Sequence: Synthetic oligonucleotide
tctttttgattt

SEQ ID NO: 70 - DNA, 15 bp, Artificial Sequence
  Description of Artificial Sequence: Synthetic oligonucleotide
ccttccttctttttg

SEQ ID NO: 71 - DNA, 15 bp, Artificial Sequence
  Description of Artificial Sequence: Synthetic oligonucleotide
gagcaccttccttct

SEQ ID NO: 72 - DNA, 15 bp, Artificial Sequence
  Description of Artificial Sequence: Synthetic oligonucleotide
aatgtgagcaccttc

SEQ ID NO: 73 - DNA, 15 bp, Artificial Sequence
  Description of Artificial Sequence: Synthetic oligonucleotide
taaggaatgtgagca

SEQ ID NO: 74 - DNA, 18 bp, Artificial Sequence
  Description of Artificial Sequence: Synthetic oligonucleotide
aatttaaggaatgtgagc

SEQ ID NO: 75 - DNA, 15 bp, Artificial Sequence
  Description of Artificial Sequence: Synthetic oligonucleotide
ttaaggaatgtgagc

SEQ ID NO: 76 - DNA, 18 bp, Artificial Sequence
  Description of Artificial Sequence: Synthetic oligonucleotide
taatttaaggaatgtgag

SEQ ID NO: 77 - DNA, 15 bp, Artificial Sequence
  Description of Artificial Sequence: Synthetic oligonucleotide
tttaaggaatgtgag

SEQ ID NO: 78 - DNA, 12 bp, Artificial Sequence
  Description of Artificial Sequence: Synthetic oligonucleotide
aaggaatgtgag

SEQ ID NO: 79 - DNA, 18 bp, Artificial Sequence
  Description of Artificial Sequence: Synthetic oligonucleotide
ttaatttaaggaatgtga

SEQ ID NO: 80 - DNA, 15 bp, Artificial Sequence
  Description of Artificial Sequence: Synthetic oligonucleotide
atttaaggaatgtga

SEQ ID NO: 81 - DNA, 12 bp, Artificial Sequence
  Description of Artificial Sequence: Synthetic oligonucleotide
taaggaatgtga

SEQ ID NO: 82 - DNA, 18 bp, Artificial Sequence
  Description of Artificial Sequence: Synthetic oligonucleotide
cttaatttaaggaatgtg

SEQ ID NO: 83 - DNA, 15 bp, Artificial Sequence
  Description of Artificial Sequence: Synthetic oligonucleotide
aatttaaggaatgtg

SEQ ID NO: 84 - DNA, 12 bp, Artificial Sequence
  Description of Artificial Sequence: Synthetic oligonucleotide
ttaaggaatgtg

SEQ ID NO: 85 - DNA, 15 bp, Artificial Sequence
  Description of Artificial Sequence: Synthetic oligonucleotide
taatttaaggaatgt

SEQ ID NO: 86 - DNA, 18 bp, Artificial Sequence
  Description of Artificial Sequence: Synthetic oligonucleotide
ccttaatttaaggaatgt

SEQ ID NO: 87 - DNA, 12 bp, Artificial Sequence
  Description of Artificial Sequence: Synthetic oligonucleotide
tttaaggaatgt

SEQ ID NO: 88 - DNA, 15 bp, Artificial Sequence
  Description of Artificial Sequence: Synthetic oligonucleotide
ttaatttaaggaatg

SEQ ID NO: 89 - DNA, 12 bp, Artificial Sequence
  Description of Artificial Sequence: Synthetic oligonucleotide
atttaaggaatg

SEQ ID NO: 90 - DNA, 15 bp, Artificial Sequence
  Description of Artificial Sequence: Synthetic oligonucleotide
cttaatttaaggaat

SEQ ID NO: 91 - DNA, 12 bp, Artificial Sequence
  Description of Artificial Sequence: Synthetic oligonucleotide
aatttaaggaat

SEQ ID NO: 92 - DNA, 15 bp, Artificial Sequence
  Description of Artificial Sequence: Synthetic oligonucleotide
ccttaatttaaggaa

SEQ ID NO: 93 - DNA, 12 bp, Artificial Sequence
  Description of Artificial Sequence: Synthetic oligonucleotide
taatttaaggaa

SEQ ID NO: 94 - DNA, 15 bp, Artificial Sequence
  Description of Artificial Sequence: Synthetic oligonucleotide
tccttaatttaagga

SEQ ID NO: 95 - DNA, 12 bp, Artificial Sequence
  Description of Artificial Sequence: Synthetic oligonucleotide
ttaatttaagga

SEQ ID NO: 96 - DNA, 12 bp, Artificial Sequence
  Description of Artificial Sequence: Synthetic oligonucleotide
cttaatttaagg

SEQ ID NO: 97 - DNA, 12 bp, Artificial Sequence
  Description of Artificial Sequence: Synthetic oligonucleotide
ccttaatttaag

SEQ ID NO: 98 - DNA, 15 bp, Artificial Sequence
  Description of Artificial Sequence: Synthetic oligonucleotide
tgctggcagacttac

SEQ ID NO: 99 - DNA, 15 bp, Artificial Sequence
  Description of Artificial Sequence: Synthetic oligonucleotide
cataatgctggcaga

SEQ ID NO: 100 - DNA, 15 bp, Artificial Sequence
  Description of Artificial Sequence: Synthetic oligonucleotide
tcataatgctggcag

SEQ ID NO: 101 - DNA, 15 bp, Artificial Sequence
  Description of Artificial Sequence: Synthetic oligonucleotide
ttcataatgctggca

SEQ ID NO: 102 - DNA, 15 bp, Artificial Sequence
  Description of Artificial Sequence: Synthetic oligonucleotide
tttcataatgctggc

SEQ ID NO: 103 - DNA, 20 bp, Artificial Sequence
  Description of Artificial Sequence: Synthetic oligonucleotide
attcactttcataatgctgg

SEQ ID NO: 104 - DNA, 15 bp, Artificial Sequence
  Description of Artificial Sequence: Synthetic oligonucleotide
ctttcataatgctgg

SEQ ID NO: 105 - DNA, 12 bp, Artificial Sequence
  Description of Artificial Sequence: Synthetic oligonucleotide
tcataatgctgg

SEQ ID NO: 106 - DNA, 15 bp, Artificial Sequence
  Description of Artificial Sequence: Synthetic oligonucleotide
actttcataatgctg

SEQ ID NO: 107 - DNA, 12 bp, Artificial Sequence
  Description of Artificial Sequence: Synthetic oligonucleotide
ttcataatgctg

SEQ ID NO: 108 - DNA, 15 bp, Artificial Sequence
  Description of Artificial Sequence: Synthetic oligonucleotide
cactttcataatgct

SEQ ID NO: 109 - DNA, 12 bp, Artificial Sequence
  Description of Artificial Sequence: Synthetic oligonucleotide
tttcataatgct

SEQ ID NO: 110 - DNA, 15 bp, Artificial Sequence
  Description of Artificial Sequence: Synthetic oligonucleotide
tcactttcataatgc

SEQ ID NO: 111 - DNA, 12 bp, Artificial Sequence
  Description of Artificial Sequence: Synthetic oligonucleotide
gtttcataatgc

SEQ ID NO: 112 - DNA, 15 bp, Artificial Sequence
  Description of Artificial Sequence: Synthetic oligonucleotide
ttcactttcataatg

SEQ ID NO: 113 - DNA, 12 bp, Artificial Sequence
  Description of Artificial Sequence: Synthetic oligonucleotide
actttcataatg

SEQ ID NO: 114 - DNA, 15 bp, Artificial Sequence
  Description of Artificial Sequence: Synthetic oligonucleotide
attcactttcataat

SEQ ID NO: 115 - DNA, 12 bp, Artificial Sequence
  Description of Artificial Sequence: Synthetic oligonucleotide
cactttcataat

SEQ ID NO: 116 - DNA, 15 bp, Artificial Sequence
  Description of Artificial Sequence: Synthetic oligonucleotide
gattcactttcataa

SEQ ID NO: 117 - DNA, 12 bp, Artificial Sequence
  Description of Artificial Sequence: Synthetic oligonucleotide
tcactttcataa

SEQ ID NO: 118 - DNA, 12 bp, Artificial Sequence
  Description of Artificial Sequence: Synthetic oligonucleotide
ttcactttcata

SEQ ID NO: 119 - DNA, 12 bp, Artificial Sequence
  Description of Artificial Sequence: Synthetic oligonucleotide
attcactttcat

SEQ ID NO: 120 - DNA, 15 bp, Artificial Sequence
  Description of Artificial Sequence: Synthetic oligonucleotide
agtaagattcacttt

SEQ ID NO: 121 - DNA, 15 bp, Artificial Sequence
  Description of Artificial Sequence: Synthetic oligonucleotide
acaaaagtaagattc

SEQ ID NO: 122 - DNA, 15 bp, Artificial Sequence
  Description of Artificial Sequence: Synthetic oligonucleotide
gttttacaaaagtaa

SEQ ID NO: 123 - DNA, 15 bp, Artificial Sequence
  Description of Artificial Sequence: Synthetic oligonucleotide
ataaagttttacaaa

SEQ ID NO: 124 - DNA, 15 bp, Artificial Sequence
  Description of Artificial Sequence: Synthetic oligonucleotide
aaaccataaagtttt

SEQ ID NO: 125 - DNA, 15 bp, Artificial Sequence
  Description of Artificial Sequence: Synthetic oligonucleotide
tccacaaaccataaa

SEQ ID NO: 126 - DNA, 20 bp, Artificial Sequence
  Description of Artificial Sequence: Synthetic oligonucleotide
attcactttcataatgctgg

SEQ ID NO: 127 - DNA, 20 bp, Artificial Sequence
  Description of Artificial Sequence: Synthetic oligonucleotide
attcactttcataatgctgg

SEQ ID NO: 128 - DNA, 20 bp, Artificial Sequence
  Description of Artificial Sequence: Synthetic oligonucleotide
attcactttcataatgctgg

SEQ ID NO: 129 - DNA, 20 bp, Artificial Sequence
  Description of Artificial Sequence: Synthetic oligonucleotide
attcactttcataatgctgg

SEQ ID NO: 130 - DNA, 20 bp, Artificial Sequence
  Description of Artificial Sequence: Synthetic oligonucleotide
attcactttcataatgctgg

SEQ ID NO: 131 - DNA, 20 bp, Artificial Sequence
  Description of Artificial Sequence: Synthetic oligonucleotide
attcactttcataatgctgg

SEQ ID NO: 132 - DNA, 20 bp, Artificial Sequence
  Description of Artificial Sequence: Synthetic oligonucleotide
attcactttcataatgctgg

SEQ ID NO: 133 - DNA, 20 bp, Artificial Sequence
  Description of Artificial Sequence: Synthetic oligonucleotide
attcactttcataatgctgg

SEQ ID NO: 134 - DNA, 17 bp, Artificial Sequence
  Description of Artificial Sequence: Synthetic oligonucleotide
cactttcataatgctgg

SEQ ID NO: 135 - DNA, 17 bp, Artificial Sequence
  Description of Artificial Sequence: Synthetic oligonucleotide
cactttcataatgctgg

SEQ ID NO: 136 - DNA, 17 bp, Artificial Sequence
  Description of Artificial Sequence: Synthetic oligonucleotide
cactttcataatgctgg

SEQ ID NO: 137 - DNA, 17 bp, Artificial Sequence
  Description of Artificial Sequence: Synthetic oligonucleotide
cactttcataatgctgg

SEQ ID NO: 138 - DNA, 17 bp, Artificial Sequence
  Description of Artificial Sequence: Synthetic oligonucleotide
cactttcataatgctgg

SEQ ID NO: 139 - DNA, 17 bp, Artificial Sequence
  Description of Artificial Sequence: Synthetic oligonucleotide
cactttcataatgctgg

SEQ ID NO: 140 - DNA, 17 bp, Artificial Sequence
  Description of Artificial Sequence: Synthetic oligonucleotide
cactttcataatgctgg

SEQ ID NO: 141 - DNA, 17 bp, Artificial Sequence
  Description of Artificial Sequence: Synthetic oligonucleotide
cactttcataatgctgg

SEQ ID NO: 142 - DNA, 17 bp, Artificial Sequence
  Description of Artificial Sequence: Synthetic oligonucleotide
cactttcataatgctgg

SEQ ID NO: 143 - DNA, 17 bp, Artificial Sequence
  Description of Artificial Sequence: Synthetic oligonucleotide
cactttcataatgctgg

SEQ ID NO: 144 - DNA, 14 bp, Artificial Sequence
  Description of Artificial Sequence: Synthetic oligonucleotide
tttcataatgctgg

SEQ ID NO: 145 - DNA, 14 bp, Artificial Sequence
  Description of Artificial Sequence: Synthetic oligonucleotide
tttcataatgctgg

SEQ ID NO: 146 - DNA, 14 bp, Artificial Sequence
  Description of Artificial Sequence: Synthetic oligonucleotide
tttcataatgctgg

SEQ ID NO: 147 - DNA, 14 bp, Artificial Sequence
  Description of Artificial Sequence: Synthetic oligonucleotide
tttcataatgctgg

SEQ ID NO: 148 - DNA, 14 bp, Artificial Sequence
  Description of Artificial Sequence: Synthetic oligonucleotide
tttcataatgctgg

SEQ ID NO: 149 - DNA, 14 bp, Artificial Sequence
  Description of Artificial Sequence: Synthetic oligonucleotide
tttcataatgctgg

SEQ ID NO: 150 - DNA, 14 bp, Artificial Sequence
  Description of Artificial Sequence: Synthetic oligonucleotide
tttcataatgctgg

SEQ ID NO: 151 - DNA, 11 bp, Artificial Sequence
  Description of Artificial Sequence: Synthetic oligonucleotide
aatgctggcag

SEQ ID NO: 152 - DNA, 11 bp, Artificial Sequence
  Description of Artificial Sequence: Synthetic oligonucleotide
aatgctggcag

SEQ ID NO: 153 - DNA, 11 bp, Artificial Sequence
  Description of Artificial Sequence: Synthetic oligonucleotide
aatgctggcag

SEQ ID NO: 154 - DNA, 11 bp, Artificial Sequence
  Description of Artificial Sequence: Synthetic oligonucleotide
aatgctggcag

SEQ ID NO: 155 - DNA, 11 bp, Artificial Sequence
  Description of Artificial Sequence: Synthetic oligonucleotide
aatgctggcag

SEQ ID NO: 156 - DNA, 11 bp, Artificial Sequence
  Description of Artificial Sequence: Synthetic oligonucleotide
aatgctggcag

SEQ ID NO: 157 - DNA, 11 bp, Artificial Sequence
  Description of Artificial Sequence: Synthetic oligonucleotide
aatgctggcag

SEQ ID NO: 158 - DNA, 8 bp, Artificial Sequence
  Description of Artificial Sequence: Synthetic oligonucleotide
gctggcag

SEQ ID NO: 159 - DNA, 8 bp, Artificial Sequence
  Description of Artificial Sequence: Synthetic oligonucleotide
gctggcag

SEQ ID NO: 160 - DNA, 8 bp, Artificial Sequence
  Description of Artificial Sequence: Synthetic oligonucleotide
gctggcag

SEQ ID NO: 161 - DNA, 8 bp, Artificial Sequence
  Description of Artificial Sequence: Synthetic oligonucleotide
gctggcag

SEQ ID NO: 162 - DNA, 8 bp, Artificial Sequence
  Description of Artificial Sequence: Synthetic oligonucleotide
gctggcag

SEQ ID NO: 163 - DNA, 8 bp, Artificial Sequence
  Description of Artificial Sequence: Synthetic oligonucleotide
gctggcag

SEQ ID NO: 164 - DNA, 8 bp, Artificial Sequence
  Description of Artificial Sequence: Synthetic oligonucleotide
gctggcag

SEQ ID NO: 165 - DNA, 8 bp, Artificial Sequence
  Description of Artificial Sequence: Synthetic oligonucleotide
gctggcag

SEQ ID NO: 166 - DNA, 8 bp, Artificial Sequence
  Description of Artificial Sequence: Synthetic oligonucleotide
gctggcag

SEQ ID NO: 167 - DNA, 21 bp, Artificial Sequence
  Description of Artificial Sequence: Synthetic oligonucleotide
ctagtatttcctgcaaatgag

SEQ ID NO: 168 - DNA, 21 bp, Artificial Sequence
  Description of Artificial Sequence: Synthetic oligonucleotide
ctagtatttcctgcaaatgag

SEQ ID NO: 169 - DNA, 21 bp, Artificial Sequence
  Description of Artificial Sequence: Synthetic oligonucleotide
ctagtatttcctgcaaatgag

SEQ ID NO: 170 - DNA, 21 bp, Artificial Sequence
  Description of Artificial Sequence: Synthetic oligonucleotide
ctagtatttcctgcaaatgag

SEQ ID NO: 171 - DNA, 21 bp, Artificial Sequence
  Description of Artificial Sequence: Synthetic oligonucleotide
ctagtatttcctgcaaatgag

SEQ ID NO: 172 - DNA, 21 bp, Artificial Sequence
  Description of Artificial Sequence: Synthetic oligonucleotide
ctagtatttcctgcaaatgag

SEQ ID NO: 173 - DNA, 21 bp, Artificial Sequence
  Description of Artificial Sequence: Synthetic oligonucleotide
ctagtatttcctgcaaatgag

SEQ ID NO: 174 - DNA, 21 bp, Artificial Sequence
  Description of Artificial Sequence: Synthetic oligonucleotide
ctagtatttcctgcaaatgag

SEQ ID NO: 175 - DNA, 21 bp, Artificial Sequence
  Description of Artificial Sequence: Synthetic oligonucleotide
ctagtatttcctgcaaatgag

SEQ ID NO: 176 - DNA, 21 bp, Artificial Sequence
  Description of Artificial Sequence: Synthetic oligonucleotide
ctagtatttcctgcaaatgag

SEQ ID NO: 177 - DNA, 21 bp, Artificial Sequence
  Description of Artificial Sequence: Synthetic oligonucleotide
ctagtatttcctgcaaatgag

SEQ ID NO: 178 - DNA, 21 bp, Artificial Sequence
  Description of Artificial Sequence: Synthetic oligonucleotide
ccagcatttcctgcaaatgag

SEQ ID NO: 179 - DNA, 21 bp, Artificial Sequence
  Description of Artificial Sequence: Synthetic oligonucleotide
ccagcatttcctgcaaatgag

SEQ ID NO: 180 - DNA, 21 bp, Artificial Sequence
  Description of Artificial Sequence: Synthetic oligonucleotide
ccagcatttcctgcaaatgag

SEQ ID NO: 181 - DNA, 21 bp, Artificial Sequence
  Description of Artificial Sequence: Synthetic oligonucleotide
ccagcatttcctgcaaatgag

SEQ ID NO: 182 - DNA, 21 bp, Artificial Sequence
  Description of Artificial Sequence: Synthetic oligonucleotide
ccagcatttcctgcaaatgag

SEQ ID NO: 183 - DNA, 21 bp, Artificial Sequence
  Description of Artificial Sequence: Synthetic oligonucleotide
ccagcatttcctgcaaatgag

SEQ ID NO: 184 - DNA, 21 bp, Artificial Sequence
  Description of Artificial Sequence: Synthetic oligonucleotide
ccagcatttcctgcaaatgag

SEQ ID NO: 185 - DNA, 21 bp, Artificial Sequence
  Description of Artificial Sequence: Synthetic oligonucleotide
ccagcatttcctgcaaatgag

SEQ ID NO: 186 - DNA, 21 bp, Artificial Sequence
  Description of Artificial Sequence: Synthetic oligonucleotide
ccagcatttcctgcaaatgag

SEQ ID NO: 187 - DNA, 25 bp, Artificial Sequence
  Description of Artificial Sequence: Synthetic oligonucleotide
atgccagcatttcctgcaaatgaga

SEQ ID NO: 188 - DNA, 25 bp, Artificial Sequence
  Description of Artificial Sequence: Synthetic oligonucleotide
atgccagcatttcctgcaaatgaga

SEQ ID NO: 189 - DNA, 25 bp, Artificial Sequence
  Description of Artificial Sequence: Synthetic oligonucleotide
atgccagcatttcctgcaaatgaga

SEQ ID NO: 190 - DNA, 25 bp, Artificial Sequence
  Description of Artificial Sequence: Synthetic oligonucleotide
atgccagcatttcctgcaaatgaga

SEQ ID NO: 191 - DNA, 25 bp, Artificial Sequence
  Description of Artificial Sequence: Synthetic oligonucleotide
atgccagcatttcctgcaaatgaga

SEQ ID NO: 192 - DNA, 25 bp, Artificial Sequence
  Description of Artificial Sequence: Synthetic oligonucleotide
atgccagcatttcctgcaaatgaga

SEQ ID NO: 193 - DNA, 25 bp, Artificial Sequence
  Description of Artificial Sequence: Synthetic oligonucleotide
atgccagcatttcctgcaaatgaga

SEQ ID NO: 194 - DNA, 25 bp, Artificial Sequence
  Description of Artificial Sequence: Synthetic oligonucleotide
atgccagcatttcctgcaaatgaga

SEQ ID NO: 195 - DNA, 25 bp, Artificial Sequence
  Description of Artificial Sequence: Synthetic oligonucleotide
gctctatgccagcatttcctgcaaa

SEQ ID NO: 196 - DNA, 25 bp, Artificial Sequence
  Description of Artificial Sequence: Synthetic oligonucleotide
gctctatgccagcatttcctgcaaa

SEQ ID NO: 197 - DNA, 25 bp, Artificial Sequence
  Description of Artificial Sequence: Synthetic oligonucleotide
gctctatgccagcatttcctgcaaa

SEQ ID NO: 198 - DNA, 25 bp, Artificial Sequence
  Description of Artificial Sequence: Synthetic oligonucleotide
gctctatgccagcatttcctgcaaa

SEQ ID NO: 199 - DNA, 25 bp, Artificial Sequence
  Description of Artificial Sequence: Synthetic oligonucleotide
gctctatgccagcatttcctgcaaa

SEQ ID NO: 200 - DNA, 25 bp, Artificial Sequence
  Description of Artificial Sequence: Synthetic oligonucleotide
gctctatgccagcatttcctgcaaa

SEQ ID NO: 201 - DNA, 25 bp, Artificial Sequence
  Description of Artificial Sequence: Synthetic oligonucleotide
gctctatgccagcatttcctgcaaa

SEQ ID NO: 202 - DNA, 25 bp, Artificial Sequence
  Description of Artificial Sequence: Synthetic oligonucleotide
gctctatgccagcatttcctgcaaa

SEQ ID NO: 203 - DNA, 25 bp, Artificial Sequence
  Description of Artificial Sequence: Synthetic oligonucleotide
gctctatgccagcatttcctgcaaa

SEQ ID NO: 204 - DNA, 25 bp, Artificial Sequence
  Description of Artificial Sequence: Synthetic oligonucleotide
gctctatgccagcatttcctgcaaa

SEQ ID NO: 205 - RNA, 20 nt, Artificial Sequence
  Description of Artificial Sequence: Synthetic oligonucleotide
ucaaggaagauggcauuucu

SEQ ID NO: 206 - RNA, 20 nt, Artificial Sequence
  Description of Artificial Sequence: Synthetic oligonucleotide
ucaaggaagauggcauuucu

SEQ ID NO: 207 - RNA, 20 nt, Artificial Sequence
  Description of Artificial Sequence: Synthetic oligonucleotide
ggccaaaccucggcuuaccu

SEQ ID NO: 208 - RNA, 30 nt, Artificial Sequence
  Description of Artificial Sequence: Synthetic oligonucleotide
cuccaacaucaaggaagauggcauuucuag

SEQ ID NO: 209 - RNA, 25 nt, Artificial Sequence
  Description of Artificial Sequence: Synthetic oligonucleotide
accagaguaacagucugaguaggag

SEQ ID NO: 210 - RNA, 25 nt, Artificial Sequence
  Description of Artificial Sequence: Synthetic oligonucleotide
caccagaguaacagucugaguagga

SEQ ID NO: 211 - RNA, 25 nt, Artificial Sequence
  Description of Artificial Sequence: Synthetic oligonucleotide
ucaccagaguaacagucugaguagg

SEQ ID NO: 212 - RNA, 25 nt, Artificial Sequence
  Description of Artificial Sequence: Synthetic oligonucleotide
gucaccagaguaacagucugaguag

SEQ ID NO: 213 - RNA, 25 nt, Artificial Sequence
  Description of Artificial Sequence: Synthetic oligonucleotide
guugugucaccagaguaacagucug

SEQ ID NO: 214 - RNA, 25 nt, Artificial Sequence
  Description of Artificial Sequence: Synthetic oligonucleotide
gguugugucaccagaguaacagucu

SEQ ID NO: 215 - RNA, 25 nt, Artificial Sequence
  Description of Artificial Sequence: Synthetic oligonucleotide
agguugugucaccagaguaacaguc

SEQ ID NO: 216 - RNA, 25 nt, Artificial Sequence
  Description of Artificial Sequence: Synthetic oligonucleotide
cagguugugucaccagaguaacagu

SEQ ID NO: 217 - RNA, 25 nt, Artificial Sequence
  Description of Artificial Sequence: Synthetic oligonucleotide
acagguugugucaccagaguaacag

SEQ ID NO: 218 - RNA, 25 nt, Artificial Sequence
  Description of Artificial Sequence: Synthetic oligonucleotide
ccacagguugugucaccagaguaac

SEQ ID NO: 219 - RNA, 25 nt, Artificial Sequence
  Description of Artificial Sequence: Synthetic oligonucleotide
accacagguugugucaccagaguaa

SEQ ID NO: 220 - RNA, 25 nt, Artificial Sequence
  Description of Artificial Sequence: Synthetic oligonucleotide
aaccacagguugugucaccagagua

SEQ ID NO: 221 - RNA, 25 nt, Artificial Sequence
  Description of Artificial Sequence: Synthetic oligonucleotide
uaaccacagguugugucaccagagu

SEQ ID NO: 222 - RNA, 25 nt, Artificial Sequence
  Description of Artificial Sequence: Synthetic oligonucleotide
guaaccacagguugugucaccagag

SEQ ID NO: 223 - RNA, 25 nt, Artificial Sequence
  Description of Artificial Sequence: Synthetic oligonucleotide
aguaaccacagguugugucaccaga

SEQ ID NO: 224 - RNA, 25 nt, Artificial Sequence
  Description of Artificial Sequence: Synthetic oligonucleotide
uaguaaccacagguugugucaccag

SEQ ID NO: 225 - RNA, 25 nt, Artificial Sequence
  Description of Artificial Sequence: Synthetic oligonucleotide
uuaguaaccacagguugugucacca

SEQ ID NO: 226 - RNA, 25 nt, Artificial Sequence
  Description of Artificial Sequence: Synthetic oligonucleotide
cuuaguaaccacagguugugucacc

SEQ ID NO: 227 - RNA, 25 nt, Artificial Sequence
  Description of Artificial Sequence: Synthetic oligonucleotide
ccuuaguaaccacagguugugucac

SEQ ID NO: 228 - RNA, 25 nt, Artificial Sequence
  Description of Artificial Sequence: Synthetic oligonucleotide
uccuuaguaaccacagguuguguca

SEQ ID NO: 229 - RNA, 25 nt, Artificial Sequence
  Description of Artificial Sequence: Synthetic oligonucleotide
guuuccuuaguaaccacagguugug

SEQ ID NO: 230 - RNA, 25 nt, Artificial Sequence
  Description of Artificial Sequence: Synthetic oligonucleotide
aguuuccuuaguaaccacagguugu

SEQ ID NO: 231 - RNA, 25 nt, Artificial Sequence
  Description of Artificial Sequence: Synthetic oligonucleotide
caguuuccuuaguaaccacagguug

SEQ ID NO: 232 - RNA, 25 nt, Artificial Sequence
  Description of Artificial Sequence: Synthetic oligonucleotide
gcaguuuccuuaguaaccacagguu

SEQ ID NO: 233 - RNA, 25 nt, Artificial Sequence
  Description of Artificial Sequence: Synthetic oligonucleotide
ggcaguuuccuuaguaaccacaggu

SEQ ID NO: 234 - RNA, 25 nt, Artificial Sequence
  Description of Artificial Sequence: Synthetic oligonucleotide
uggcaguuuccuuaguaaccacagg

SEQ ID NO: 235 - RNA, 25 nt, Artificial Sequence
  Description of Artificial Sequence: Synthetic oligonucleotide
auggcaguuuccuuaguaaccacag

SEQ ID NO: 236 - RNA, 25 nt, Artificial Sequence
  Description of Artificial Sequence: Synthetic oligonucleotide
agauggcaguuuccuuaguaaccac

SEQ ID NO: 237 - RNA, 25 nt, Artificial Sequence
  Description of Artificial Sequence: Synthetic oligonucleotide
gagauggcaguuuccuuaguaacca

SEQ ID NO: 238 - RNA, 25 nt, Artificial Sequence
  Description of Artificial Sequence: Synthetic oligonucleotide
ggagauggcaguuuccuuaguaacc

SEQ ID NO: 239 - RNA, 25 nt, Artificial Sequence
  Description of Artificial Sequence: Synthetic oligonucleotide
uggagauggcaguuuccuuaguaac

SEQ ID NO: 240 - RNA, 25 nt, Artificial Sequence
  Description of Artificial Sequence: Synthetic oligonucleotide
uuggagauggcaguuuccuuaguaa

SEQ ID NO: 241 - RNA, 25 nt, Artificial Sequence
  Description of Artificial Sequence: Synthetic oligonucleotide
uuuggagauggcaguuuccuuagua

SEQ ID NO: 242 - RNA, 25 nt, Artificial Sequence
  Description of Artificial Sequence: Synthetic oligonucleotide
aguuuggagauggcaguuuccuuag

SEQ ID NO: 243 - RNA, 25 nt, Artificial Sequence
  Description of Artificial Sequence: Synthetic oligonucleotide
uaguuuggagauggcaguuuccuua

SEQ ID NO: 244 - RNA, 25 nt, Artificial Sequence
  Description of Artificial Sequence: Synthetic oligonucleotide
cuaguuuggagauggcaguuuccuu

SEQ ID NO: 245 - RNA, 25 nt, Artificial Sequence
  Description of Artificial Sequence: Synthetic oligonucleotide
ucuaguuuggagauggcaguuuccu

SEQ ID NO: 246 - RNA, 25 nt, Artificial Sequence
  Description of Artificial Sequence: Synthetic oligonucleotide
uucuaguuuggagauggcaguuucc

SEQ ID NO: 247 - RNA, 25 nt, Artificial Sequence
  Description of Artificial Sequence: Synthetic oligonucleotide
cauuucuaguuuggagauggcaguu

SEQ ID NO: 248 - RNA, 25 nt, Artificial Sequence
  Description of Artificial Sequence: Synthetic oligonucleotide
gcauuucuaguuuggagauggcagu

SEQ ID NO: 249 - RNA, 25 nt, Artificial Sequence
  Description of Artificial Sequence: Synthetic oligonucleotide
auggcauuucuaguuuggagauggc

SEQ ID NO: 250 - RNA, 25 nt, Artificial Sequence
  Description of Artificial Sequence: Synthetic oligonucleotide
gaagauggcauuucuaguuuggaga

SEQ ID NO: 251 - RNA, 25 nt, Artificial Sequence
  Description of Artificial Sequence: Synthetic oligonucleotide
aggaagauggcauuucuaguuugga

SEQ ID NO: 252 - RNA, 25 nt, Artificial Sequence
  Description of Artificial Sequence: Synthetic oligonucleotide
aaggaagauggcauuucuaguuugg

SEQ ID NO: 253 - RNA, 25 nt, Artificial Sequence
  Description of Artificial Sequence: Synthetic oligonucleotide
caaggaagauggcauuucuaguuug

SEQ ID NO: 254 - RNA, 25 nt, Artificial Sequence
  Description of Artificial Sequence: Synthetic oligonucleotide
caucaaggaagauggcauuucuagu

SEQ ID NO: 255 - RNA, 25 nt, Artificial Sequence
  Description of Artificial Sequence: Synthetic oligonucleotide
acaucaaggaagauggcauuucuag

SEQ ID NO: 256 - RNA, 25 nt, Artificial Sequence
  Description of Artificial Sequence: Synthetic oligonucleotide
aacaucaaggaagauggcauuucua

SEQ ID NO: 257 - RNA, 25 nt, Artificial Sequence
  Description of Artificial Sequence: Synthetic oligonucleotide
caacaucaaggaagauggcauuucu

SEQ ID NO: 258 - RNA, 25 nt, Artificial Sequence
  Description of Artificial Sequence: Synthetic oligonucleotide
cuccaacaucaaggaagauggcauu

SEQ ID NO: 259 - RNA, 25 nt, Artificial Sequence
  Description of Artificial Sequence: Synthetic oligonucleotide
accuccaacaucaaggaagauggca

SEQ ID NO: 260 - RNA, 25 nt, Artificial Sequence
  Description of Artificial Sequence: Synthetic oligonucleotide
guaccuccaacaucaaggaagaugg

SEQ ID NO: 261 - RNA, 25 nt, Artificial Sequence
  Description of Artificial Sequence: Synthetic oligonucleotide
agguaccuccaacaucaaggaagau

SEQ ID NO: 262 - RNA, 25 nt, Artificial Sequence
  Description of Artificial Sequence: Synthetic oligonucleotide
agagcagguaccuccaacaucaagg

SEQ ID NO: 263 - RNA, 25 nt, Artificial Sequence
  Description of Artificial Sequence: Synthetic oligonucleotide
cagagcagguaccuccaacaucaag

SEQ ID NO: 264 - RNA, 25 nt, Artificial Sequence
  Description of Artificial Sequence: Synthetic oligonucleotide
cugccagagcagguaccuccaacau

SEQ ID NO: 265 - RNA, 25 nt, Artificial Sequence
  Description of Artificial Sequence: Synthetic oligonucleotide
ucugccagagcagguaccuccaaca

SEQ ID NO: 266 - RNA, 25 nt, Artificial Sequence
  Description of Artificial Sequence: Synthetic oligonucleotide
aucugccagagcagguaccuccaac

SEQ ID NO: 267 - RNA, 25 nt, Artificial Sequence
  Description of Artificial Sequence: Synthetic oligonucleotide
aaucugccagagcagguaccuccaa

SEQ ID NO: 268 - RNA, 25 nt, Artificial Sequence
  Description of Artificial Sequence: Synthetic oligonucleotide
aaaucugccagagcagguaccucca

SEQ ID NO: 269 - RNA, 25 nt, Artificial Sequence
  Description of Artificial Sequence: Synthetic oligonucleotide
gaaaucugccagagcagguaccucc

SEQ ID NO: 270 - RNA, 25 nt, Artificial Sequence
  Description of Artificial Sequence: Synthetic oligonucleotide
ugaaaucugccagagcagguaccuc

SEQ ID NO: 271 - RNA, 25 nt, Artificial Sequence
  Description of Artificial Sequence: Synthetic oligonucleotide
uugaaaucugccagagcagguaccu

SEQ ID NO: 272 - RNA, 25 nt, Artificial Sequence
  Description of Artificial Sequence: Synthetic oligonucleotide
cccgguugaaaucugccagagcagg

SEQ ID NO: 273 - RNA, 25 nt, Artificial Sequence
  Description of Artificial Sequence: Synthetic oligonucleotide
ccaagcccgguugaaaucugccaga

SEQ ID NO: 274 - RNA, 25 nt, Artificial Sequence
  Description of Artificial Sequence: Synthetic oligonucleotide
uccaagcccgguugaaaucugccag

SEQ ID NO: 275 - RNA, 25 nt, Artificial Sequence
  Description of Artificial Sequence: Synthetic oligonucleotide
guccaagcccgguugaaaucugcca

SEQ ID NO: 276 - RNA, 25 nt, Artificial Sequence
  Description of Artificial Sequence: Synthetic oligonucleotide
ucuguccaagcccgguugaaaucug

SEQ ID NO: 277 - RNA, 25 nt, Artificial Sequence
  Description of Artificial Sequence: Synthetic oligonucleotide
uucuguccaagcccgguugaaaucu

SEQ ID NO: 278 - RNA, 25 nt, Artificial Sequence
  Description of Artificial Sequence: Synthetic oligonucleotide
guucuguccaagcccgguugaaauc

SEQ ID NO: 279 - RNA, 25 nt, Artificial Sequence
  Description of Artificial Sequence: Synthetic oligonucleotide
aguucuguccaagcccgguugaaau

SEQ ID NO: 280 - RNA, 25 nt, Artificial Sequence
  Description of Artificial Sequence: Synthetic oligonucleotide
aaguucuguccaagcccgguugaaa

SEQ ID NO: 281 - RNA, 25 nt, Artificial Sequence
  Description of Artificial Sequence: Synthetic oligonucleotide
uaaguucuguccaagcccgguugaa

SEQ ID NO: 282 - RNA, 25 nt, Artificial Sequence
  Description of Artificial Sequence: Synthetic oligonucleotide
guaaguucuguccaagcccgguuga

SEQ ID NO: 283 - RNA, 25 nt, Artificial Sequence
  Description of Artificial Sequence: Synthetic oligonucleotide
gguaaguucuguccaagcccgguug

SEQ ID NO: 284 - RNA, 25 nt, Artificial Sequence
  Description of Artificial Sequence: Synthetic oligonucleotide
cgguaaguucuguccaagcccgguu

SEQ ID NO: 285 - RNA, 25 nt, Artificial Sequence
  Description of Artificial Sequence: Synthetic oligonucleotide
ucgguaaguucuguccaagcccggu

SEQ ID NO: 286 - RNA, 25 nt, Artificial Sequence
  Description of Artificial Sequence: Synthetic oligonucleotide
gucgguaaguucuguccaagcccgg

SEQ ID NO: 287 - RNA, 25 nt, Artificial Sequence
  Description of Artificial Sequence: Synthetic oligonucleotide
agucgguaaguucuguccaagcccg

SEQ ID NO: 288 - RNA, 25 nt, Artificial Sequence
  Description of Artificial Sequence: Synthetic oligonucleotide
cagucgguaaguucuguccaagccc

SEQ ID NO: 289 - RNA, 25 nt, Artificial Sequence
  Description of Artificial Sequence: Synthetic oligonucleotide
aaagccagucgguaaguucugucca

SEQ ID NO: 290 - RNA, 25 nt, Artificial Sequence
  Description of Artificial Sequence: Synthetic oligonucleotide
gaaagccagucgguaaguucugucc

SEQ ID NO: 291 - RNA, 25 nt, Artificial Sequence
  Description of Artificial Sequence: Synthetic oligonucleotide
gucacccaccaucacccucugugau

SEQ ID NO: 292 - RNA, 25 nt, Artificial Sequence
  Description of Artificial Sequence: Synthetic oligonucleotide
ggucacccaccaucacccucuguga

SEQ ID NO: 293 - RNA, 25 nt, Artificial Sequence
  Description of Artificial Sequence: Synthetic oligonucleotide
aaggucacccaccaucacccucugu

SEQ ID NO: 294 - RNA, 25 nt, Artificial Sequence
  Description of Artificial Sequence: Synthetic oligonucleotide
caaggucacccaccaucacccucug

SEQ ID NO: 295 - RNA, 25 nt, Artificial Sequence
  Description of Artificial Sequence: Synthetic oligonucleotide
ucaaggucacccaccaucacccucu

SEQ ID NO: 296 - RNA, 25 nt, Artificial Sequence
  Description of Artificial Sequence: Synthetic oligonucleotide
cucaaggucacccaccaucacccuc

SEQ ID NO: 297 - RNA, 25 nt, Artificial Sequence
  Description of Artificial Sequence: Synthetic oligonucleotide
cuugaucaagcagagaaagccaguc

SEQ ID NO: 298 - RNA, 25 nt, Artificial Sequence
  Description of Artificial Sequence: Synthetic oligonucleotide
auaacuugaucaagcagagaaagcc

SEQ ID NO: 299 - RNA, 20 nt, Artificial Sequence
  Description of Artificial Sequence: Synthetic oligonucleotide
aguaacagucugaguaggag

SEQ ID NO: 300 - RNA, 20 nt, Artificial Sequence
  Description of Artificial Sequence: Synthetic oligonucleotide
gaguaacagucugaguagga

SEQ ID NO: 301 - RNA, 20 nt, Artificial Sequence
  Description of Artificial Sequence: Synthetic oligonucleotide
agaguaacagucugaguagg

SEQ ID NO: 302 - RNA, 20 nt, Artificial Sequence
  Description of Artificial Sequence: Synthetic oligonucleotide
cagaguaacagucugaguag

SEQ ID NO: 303 - RNA, 20 nt, Artificial Sequence
  Description of Artificial Sequence: Synthetic oligonucleotide
gucaccagaguaacagucug

SEQ ID NO: 304 - RNA, 20 nt, Artificial Sequence
  Description of Artificial Sequence: Synthetic oligonucleotide
ugucaccagaguaacagucu

SEQ ID NO: 305 - RNA, 20 nt, Artificial Sequence
  Description of Artificial Sequence: Synthetic oligonucleotide
gugucaccagaguaacaguc

SEQ ID NO: 306 - RNA, 20 nt, Artificial Sequence
  Description of Artificial Sequence: Synthetic oligonucleotide
ugugucaccagaguaacagu

SEQ ID NO: 307 - RNA, 20 nt, Artificial Sequence
  Description of Artificial Sequence: Synthetic oligonucleotide
uugugucaccagaguaacag

SEQ ID NO: 308 - RNA, 20 nt, Artificial Sequence
  Description of Artificial Sequence: Synthetic oligonucleotide
gguugugucaccagaguaac

SEQ ID NO: 309 - RNA, 20 nt, Artificial Sequence
  Description of Artificial Sequence: Synthetic oligonucleotide
agguugugucaccagaguaa

SEQ ID NO: 310 - RNA, 20 nt, Artificial Sequence
  Description of Artificial Sequence: Synthetic oligonucleotide
cagguugugucaccagagua

SEQ ID NO: 311 - RNA, 20 nt, Artificial Sequence
  Description of Artificial Sequence: Synthetic oligonucleotide
acagguugugucaccagagu

SEQ ID NO: 312 - RNA, 20 nt, Artificial Sequence
  Description of Artificial Sequence: Synthetic oligonucleotide
cacagguugugucaccagag

SEQ ID NO: 313 - RNA, 20 nt, Artificial Sequence
  Description of Artificial Sequence: Synthetic oligonucleotide
ccacagguugugucaccaga

SEQ ID NO: 314 - RNA, 20 nt, Artificial Sequence
  Description of Artificial Sequence: Synthetic oligonucleotide
accacagguugugucaccag

SEQ ID NO: 315 - RNA, 20 nt, Artificial Sequence
  Description of Artificial Sequence: Synthetic oligonucleotide
aaccacagguugugucacca

SEQ ID NO: 316 - RNA, 20 nt, Artificial Sequence
  Description of Artificial Sequence: Synthetic oligonucleotide
uaaccacagguugugucacc

SEQ ID NO: 317 - RNA, 20 nt, Artificial Sequence
  Description of Artificial Sequence: Synthetic oligonucleotide
guaaccacagguugugucac

SEQ ID NO: 318 - RNA, 20 nt, Artificial Sequence
  Description of Artificial Sequence: Synthetic oligonucleotide
aguaaccacagguuguguca

SEQ ID NO: 319 - RNA, 20 nt, Artificial Sequence
  Description of Artificial Sequence: Synthetic oligonucleotide
cuuaguaaccacagguugug

SEQ ID NO: 320 - RNA, 20 nt, Artificial Sequence
  Description of Artificial Sequence: Synthetic oligonucleotide
ccuuaguaaccacagguugu

SEQ ID NO: 321 - RNA, 20 nt, Artificial Sequence
  Description of Artificial Sequence: Synthetic oligonucleotide
uccuuaguaaccacagguug

SEQ ID NO: 322 - RNA, 20 nt, Artificial Sequence
  Description of Artificial Sequence: Synthetic oligonucleotide
uuccuuaguaaccacagguu

SEQ ID NO: 323 - RNA, 20 nt, Artificial Sequence
  Description of Artificial Sequence: Synthetic oligonucleotide
uuuccuuaguaaccacaggu

SEQ ID NO: 324 - RNA, 20 nt, Artificial Sequence
  Description of Artificial Sequence: Synthetic oligonucleotide
guuuccuuaguaaccacagg

SEQ ID NO: 325 - RNA, 20 nt, Artificial Sequence
  Description of Artificial Sequence: Synthetic oligonucleotide
aguuuccuuaguaaccacag

SEQ ID NO: 326 - RNA, 20 nt, Artificial Sequence
  Description of Artificial Sequence: Synthetic oligonucleotide
gcaguuuccuuaguaaccac

SEQ ID NO: 327 - RNA, 20 nt, Artificial Sequence
  Description of Artificial Sequence: Synthetic oligonucleotide
ggcaguuuccuuaguaacca

SEQ ID NO: 328 - RNA, 20 nt, Artificial Sequence
  Description of Artificial Sequence: Synthetic oligonucleotide
uggcaguuuccuuaguaacc

SEQ ID NO: 329 - RNA, 20 nt, Artificial Sequence
  Description of Artificial Sequence: Synthetic oligonucleotide
auggcaguuuccuuaguaac

SEQ ID NO: 330 - RNA, 20 nt, Artificial Sequence
  Description of Artificial Sequence: Synthetic oligonucleotide
gauggcaguuuccuuaguaa

SEQ ID NO: 331 - RNA, 20 nt, Artificial Sequence
  Description of Artificial Sequence: Synthetic oligonucleotide
agauggcaguuuccuuagua

SEQ ID NO: 332 - RNA, 20 nt, Artificial Sequence
  Description of Artificial Sequence: Synthetic oligonucleotide
ggagauggcaguuuccuuag

SEQ ID NO: 333 - RNA, 20 nt, Artificial Sequence
  Description of Artificial Sequence: Synthetic oligonucleotide
uggagauggcaguuuccuua

SEQ ID NO: 334 - RNA, 20 nt, Artificial Sequence
  Description of Artificial Sequence: Synthetic oligonucleotide
uuggagauggcaguuuccuu

SEQ ID NO: 335 - RNA, 20 nt, Artificial Sequence
  Description of Artificial Sequence: Synthetic oligonucleotide
uuuggagauggcaguuuccu

SEQ ID NO: 336 - RNA, 20 nt, Artificial Sequence
  Description of Artificial Sequence: Synthetic oligonucleotide
guuuggagauggcaguuucc

SEQ ID NO: 337 - RNA, 20 nt, Artificial Sequence
  Description of Artificial Sequence: Synthetic oligonucleotide
cuaguuuggagauggcaguu

SEQ ID NO: 338 - RNA, 20 nt, Artificial Sequence
  Description of Artificial Sequence: Synthetic oligonucleotide
ucuaguuuggagauggcagu

SEQ ID NO: 339 - RNA, 20 nt, Artificial Sequence
  Description of Artificial Sequence: Synthetic oligonucleotide
auuucuaguuuggagauggc

SEQ ID NO: 340 - RNA, 20 nt, Artificial Sequence
  Description of Artificial Sequence: Synthetic oligonucleotide
uggcauuucuaguuuggaga

SEQ ID NO: 341 - RNA, 20 nt, Artificial Sequence
  Description of Artificial Sequence: Synthetic oligonucleotide
gauggcauuucuaguuugga

SEQ ID NO: 342 - RNA, 20 nt, Artificial Sequence
  Description of Artificial Sequence: Synthetic oligonucleotide
agauggcauuucuaguuugg

SEQ ID NO: 343 - RNA, 20 nt, Artificial Sequence
  Description of Artificial Sequence: Synthetic oligonucleotide
aagauggcauuucuaguuug

SEQ ID NO: 344 - RNA, 20 nt, Artificial Sequence
  Description of Artificial Sequence: Synthetic oligonucleotide
aggaagauggcauuucuagu

SEQ ID NO: 345 - RNA, 20 nt, Artificial Sequence
  Description of Artificial Sequence: Synthetic oligonucleotide
aaggaagauggcauuucuag

SEQ ID NO: 346 - RNA, 20 nt, Artificial Sequence
  Description of Artificial Sequence: Synthetic oligonucleotide
caaggaagauggcauuucua

SEQ ID NO: 347 - RNA, 20 nt, Artificial Sequence
  Description of Artificial Sequence: Synthetic oligonucleotide
ucaaggaagauggcauuucu

SEQ ID NO: 348 - RNA, 20 nt, Artificial Sequence
  Description of Artificial Sequence: Synthetic oligonucleotide
acaucaaggaagauggcauu

SEQ ID NO: 349 - RNA, 20 nt, Artificial Sequence
  Description of Artificial Sequence: Synthetic oligonucleotide
caacaucaaggaagauggca

SEQ ID NO: 350 - RNA, 20 nt, Artificial Sequence
  Description of Artificial Sequence: Synthetic oligonucleotide
uccaacaucaaggaagaugg

SEQ ID NO: 351 - RNA, 20 nt, Artificial Sequence
  Description of Artificial Sequence: Synthetic oligonucleotide
ccuccaacaucaaggaagau

SEQ ID NO: 352 - RNA, 20 nt, Artificial Sequence
  Description of Artificial Sequence: Synthetic oligonucleotide
agguaccuccaacaucaagg

SEQ ID NO: 353 - RNA, 20 nt, Artificial Sequence
  Description of Artificial Sequence: Synthetic oligonucleotide
cagguaccuccaacaucaag

SEQ ID NO: 354 - RNA, 20 nt, Artificial Sequence
  Description of Artificial Sequence: Synthetic oligonucleotide
agagcagguaccuccaacau

SEQ ID NO: 355 - RNA, 20 nt, Artificial Sequence
  Description of Artificial Sequence: Synthetic oligonucleotide
cagagcagguaccuccaaca

SEQ ID NO: 356 - RNA, 20 nt, Artificial Sequence
  Description of Artificial Sequence: Synthetic oligonucleotide
ccagagcagguaccuccaac

SEQ ID NO: 357 - RNA, 20 nt, Artificial Sequence
  Description of Artificial Sequence: Synthetic oligonucleotide
gccagagcagguaccuccaa

SEQ ID NO: 358 - RNA, 20 nt, Artificial Sequence
  Description of Artificial Sequence: Synthetic oligonucleotide
ugccagagcagguaccucca

SEQ ID NO: 359 - RNA, 20 nt, Artificial Sequence
  Description of Artificial Sequence: Synthetic oligonucleotide
cugccagagcagguaccucc

SEQ ID NO: 360 - RNA, 20 nt, Artificial Sequence
  Description of Artificial Sequence: Synthetic oligonucleotide
ucugccagagcagguaccuc

SEQ ID NO: 361 - RNA, 20 nt, Artificial Sequence
  Description of Artificial Sequence: Synthetic oligonucleotide
aucugccagagcagguaccu

SEQ ID NO: 362 - RNA, 20 nt, Artificial Sequence
  Description of Artificial Sequence: Synthetic oligonucleotide
uugaaaucugccagagcagg

SEQ ID NO: 363 - RNA, 20 nt, Artificial Sequence
  Description of Artificial Sequence: Synthetic oligonucleotide
cccgguugaaaucugccaga

SEQ ID NO: 364 - RNA, 20 nt, Artificial Sequence
  Description of Artificial Sequence: Synthetic oligonucleotide
gcccgguugaaaucugccag

SEQ ID NO: 365 - RNA, 20 nt, Artificial Sequence
  Description of Artificial Sequence: Synthetic oligonucleotide
agcccgguugaaaucugcca

SEQ ID NO: 366 - RNA, 20 nt, Artificial Sequence
  Description of Artificial Sequence: Synthetic oligonucleotide
ccaagcccgguugaaaucug

SEQ ID NO: 367 - RNA, 20 nt, Artificial Sequence
  Description of Artificial Sequence: Synthetic oligonucleotide
uccaagcccgguugaaaucu

SEQ ID NO: 368 - RNA, 20 nt, Artificial Sequence
  Description of Artificial Sequence: Synthetic oligonucleotide
guccaagcccgguugaaauc

SEQ ID NO: 369 - RNA, 20 nt, Artificial Sequence
  Description of Artificial Sequence: Synthetic oligonucleotide
uguccaagcccgguugaaau

SEQ ID NO: 370 - RNA, 20 nt, Artificial Sequence
  Description of Artificial Sequence: Synthetic oligonucleotide
cuguccaagcccgguugaaa

SEQ ID NO: 371 - RNA, 20 nt, Artificial Sequence
  Description of Artificial Sequence: Synthetic oligonucleotide
ucuguccaagcccgguugaa

SEQ ID NO: 372 - RNA, 20 nt, Artificial Sequence
  Description of Artificial Sequence: Synthetic oligonucleotide
uucuguccaagcccgguuga

SEQ ID NO: 373 - RNA, 20 nt, Artificial Sequence
  Description of Artificial Sequence: Synthetic oligonucleotide
guucuguccaagcccgguug

SEQ ID NO: 374 - RNA, 20 nt, Artificial Sequence
  Description of Artificial Sequence: Synthetic oligonucleotide
aguucuguccaagcccgguu

SEQ ID NO: 375 - RNA, 20 nt, Artificial Sequence
  Description of Artificial Sequence: Synthetic oligonucleotide
aaguucuguccaagcccggu

SEQ ID NO: 376 - RNA, 20 nt, Artificial Sequence
  Description of Artificial Sequence: Synthetic oligonucleotide
uaaguucuguccaagcccgg

SEQ ID NO: 377 - RNA, 20 nt, Artificial Sequence
  Description of Artificial Sequence: Synthetic oligonucleotide
guaaguucuguccaagcccg

SEQ ID NO: 378 - RNA, 20 nt, Artificial Sequence
  Description of Artificial Sequence: Synthetic oligonucleotide
gguaaguucuguccaagccc

SEQ ID NO: 379 - RNA, 20 nt, Artificial Sequence
  Description of Artificial Sequence: Synthetic oligonucleotide
cagucgguaaguucugucca

SEQ ID NO: 380 - RNA, 20 nt, Artificial Sequence
  Description of Artificial Sequence: Synthetic oligonucleotide
ccagucgguaaguucugucc

SEQ ID NO: 381 - RNA, 20 nt, Artificial Sequence
  Description of Artificial Sequence: Synthetic oligonucleotide
ccaccaucacccucugugau

SEQ ID NO: 382 - RNA, 20 nt, Artificial Sequence
  Description of Artificial Sequence: Synthetic oligonucleotide
cccaccaucacccucuguga

SEQ ID NO: 383 - RNA, 20 nt, Artificial Sequence
  Description of Artificial Sequence: Synthetic oligonucleotide
cacccaccaucacccucugu

SEQ ID NO: 384 - RNA, 20 nt, Artificial Sequence
  Description of Artificial Sequence: Synthetic oligonucleotide
ucacccaccaucacccucug

SEQ ID NO: 385 - RNA, 20 nt, Artificial Sequence
  Description of Artificial Sequence: Synthetic oligonucleotide
gucacccaccaucacccucu

SEQ ID NO: 386 - RNA, 20 nt, Artificial Sequence
  Description of Artificial Sequence: Synthetic oligonucleotide
ggucacccaccaucacccuc

SEQ ID NO: 387 - RNA, 20 nt, Artificial Sequence
  Description of Artificial Sequence: Synthetic oligonucleotide
ucaagcagagaaagccaguc

SEQ ID NO: 388 - RNA, 20 nt, Artificial Sequence
  Description of Artificial Sequence: Synthetic oligonucleotide
uugaucaagcagagaaagcc

SEQ ID NO: 389 - RNA, 25 nt, Artificial Sequence
  Description of Artificial Sequence: Synthetic oligonucleotide
caaagaagauggcauuucuaguuug

SEQ ID NO: 390 - RNA, 20 nt, Artificial Sequence
  Description of Artificial Sequence: Synthetic oligonucleotide
gcaaagaagauggcauuucu

SEQ ID NO: 391 - RNA, 20 nt, Artificial Sequence
  Description of Artificial Sequence: Synthetic oligonucleotide
gcaaagaagauggcauuucu

SEQ ID NO: 392 - RNA, 20 nt, Artificial Sequence
  Description of Artificial Sequence: Synthetic oligonucleotide
ucaaggaagauggcauuucu

SEQ ID NO: 393 - RNA, 20 nt, Artificial Sequence
  Description of Artificial Sequence: Synthetic oligonucleotide
ucaaggaagauggcauuucu

SEQ ID NO: 394 - RNA, 20 nt, Artificial Sequence
  Description of Artificial Sequence: Synthetic oligonucleotide
ucaaggaagauggcauuucu

SEQ ID NO: 395 - RNA, 20 nt, Artificial Sequence
  Description of Artificial Sequence: Synthetic oligonucleotide
ucaaggaagauggcauuucu

SEQ ID NO: 396 - RNA, 20 nt, Artificial Sequence
  Description of Artificial Sequence: Synthetic oligonucleotide
ucaaggaagauggcauuucu

SEQ ID NO: 397 - RNA, 20 nt, Artificial Sequence
  Description of Artificial Sequence: Synthetic oligonucleotide
ucaaggaagauggcauuucu

SEQ ID NO: 398 - RNA, 20 nt, Artificial Sequence
  Description of Artificial Sequence: Synthetic oligonucleotide
ucaaggaagauggcauuucu

SEQ ID NO: 399 - RNA, 20 nt, Artificial Sequence
  Description of Artificial Sequence: Synthetic oligonucleotide
ucaaggaagauggcauuucu

SEQ ID NO: 400 - RNA, 20 nt, Artificial Sequence
  Description of Artificial Sequence: Synthetic oligonucleotide
ucaaggaagauggcauuucu

SEQ ID NO: 401 - RNA, 20 nt, Artificial Sequence
  Description of Artificial Sequence: Synthetic oligonucleotide
ucaaggaagauggcauuucu

SEQ ID NO: 402 - RNA, 20 nt, Artificial Sequence
  Description of Artificial Sequence: Synthetic oligonucleotide
ucaaggaagauggcauuucu

SEQ ID NO: 403 - RNA, 20 nt, Artificial Sequence
  Description of Artificial Sequence: Synthetic oligonucleotide
ucaaggaagauggcauuucu

SEQ ID NO: 404 - RNA, 20 nt, Artificial Sequence
  Description of Artificial Sequence: Synthetic oligonucleotide
ucaaggaagauggcauuucu

SEQ ID NO: 405 - RNA, 20 nt, Artificial Sequence
  Description of Artificial Sequence: Synthetic oligonucleotide
ucaaggaagauggcauuucu

SEQ ID NO: 406 - RNA, 20 nt, Artificial Sequence
  Description of Artificial Sequence: Synthetic oligonucleotide
ucaaggaagauggcauuucu

SEQ ID NO: 407 - RNA, 20 nt, Artificial Sequence
  Description of Artificial Sequence: Synthetic oligonucleotide
ucaaggaagauggcauuucu

SEQ ID NO: 408 - RNA, 20 nt, Artificial Sequence
  Description of Artificial Sequence: Synthetic oligonucleotide
ucaaggaagauggcauuucu

SEQ ID NO: 409 - RNA, 20 nt, Artificial Sequence
  Description of Artificial Sequence: Synthetic oligonucleotide
ucaaggaagauggcauuucu

SEQ ID NO: 410 - RNA, 20 nt, Artificial Sequence
  Description of Artificial Sequence: Synthetic oligonucleotide
ucaaggaagauggcauuucu

SEQ ID NO: 411 - RNA, 20 nt, Artificial Sequence
  Description of Artificial Sequence: Synthetic oligonucleotide
ucaaggaagauggcauuucu

SEQ ID NO: 412 - RNA, 20 nt, Artificial Sequence
  Description of Artificial Sequence: Synthetic oligonucleotide
ucaaggaagauggcauuucu

SEQ ID NO: 413 - RNA, 20 nt, Artificial Sequence
  Description of Artificial Sequence: Synthetic oligonucleotide
ucaaggaagauggcauuucu

SEQ ID NO: 414 - RNA, 20 nt, Artificial Sequence
  Description of Artificial Sequence: Synthetic oligonucleotide
ucaaggaagauggcauuucu

SEQ ID NO: 415 - RNA, 20 nt, Artificial Sequence
  Description of Artificial Sequence: Synthetic oligonucleotide
ucaaggaagauggcauuucu

SEQ ID NO: 416 - RNA, 20 nt, Artificial Sequence
  Description of Artificial Sequence: Synthetic oligonucleotide
ucaaggaagauggcauuucu

SEQ ID NO: 417 - RNA, 20 nt, Artificial Sequence
  Description of Artificial Sequence: Synthetic oligonucleotide
ucaaggaagauggcauuucu

SEQ ID NO: 418 - RNA, 20 nt, Artificial Sequence
  Description of Artificial Sequence: Synthetic oligonucleotide
ucaaggaagauggcauuucu

SEQ ID NO: 419 - RNA, 20 nt, Artificial Sequence
  Description of Artificial Sequence: Synthetic oligonucleotide
ucaaggaagauggcauuucu

SEQ ID NO: 420 - RNA, 20 nt, Artificial Sequence
  Description of Artificial Sequence: Synthetic oligonucleotide
ucaaggaagauggcauuucu

SEQ ID NO: 421 - RNA, 20 nt, Artificial Sequence
  Description of Artificial Sequence: Synthetic oligonucleotide
ggccaaaccucggcuuaccu

SEQ ID NO: 422 - RNA, 20 nt, Artificial Sequence
  Description of Artificial Sequence: Synthetic oligonucleotide
ggccaaaccucggcuuaccu

SEQ ID NO: 423 - RNA, 20 nt, Artificial Sequence
  Description of Artificial Sequence: Synthetic oligonucleotide
ggccaaaccucggcuuaccu

SEQ ID NO: 424 - RNA, 20 nt, Artificial Sequence
  Description of Artificial Sequence: Synthetic oligonucleotide
ggccaaaccucggcuuaccu

SEQ ID NO: 425 - RNA, 20 nt, Artificial Sequence
  Description of Artificial Sequence: Synthetic oligonucleotide
ggccaaaccucggcuuaccu

SEQ ID NO: 426 - RNA, 20 nt, Artificial Sequence
  Description of Artificial Sequence: Synthetic oligonucleotide
ggccaaaccucggcuuaccu

SEQ ID NO: 427 - RNA, 20 nt, Artificial Sequence
  Description of Artificial Sequence: Synthetic oligonucleotide
ggccaaaccucggcuuaccu

SEQ ID NO: 428 - RNA, 20 nt, Artificial Sequence
  Description of Artificial Sequence: Synthetic oligonucleotide
ggccaaaccucggcuuaccu

SEQ ID NO: 429 - RNA, 20 nt, Artificial Sequence
  Description of Artificial Sequence: Synthetic oligonucleotide
ucaaggaagauggcauuucu

SEQ ID NO: 430 - RNA, 20 nt, Artificial Sequence
  Description of Artificial Sequence: Synthetic oligonucleotide
ucaaggaagauggcauuucu

SEQ ID NO: 431 - RNA, 20 nt, Artificial Sequence
  Description of Artificial Sequence: Synthetic oligonucleotide
ucaaggaagauggcauuucu

SEQ ID NO: 432 - RNA, 20 nt, Artificial Sequence
  Description of Artificial Sequence: Synthetic oligonucleotide
ucaaggaagauggcauuucu

SEQ ID NO: 433 - RNA, 20 nt, Artificial Sequence
  Description of Artificial Sequence: Synthetic oligonucleotide
ucaaggaagauggcauuucu

SEQ ID NO: 434 - RNA, 20 nt, Artificial Sequence
  Description of Artificial Sequence: Synthetic oligonucleotide
ucaaggaagauggcauuucu

SEQ ID NO: 435 - RNA, 20 nt, Artificial Sequence
  Description of Artificial Sequence: Synthetic oligonucleotide
ucaaggaagauggcauuucu

SEQ ID NO: 436 - RNA, 20 nt, Artificial Sequence
  Description of Artificial Sequence: Synthetic oligonucleotide
ucaaggaagauggcauuucu

SEQ ID NO: 437 - DNA, 20 bp, Artificial Sequence
  Description of Artificial Sequence: Synthetic oligonucleotide
ggccaaacctcggcttacct

SEQ ID NO: 438 - RNA, 20 nt, Artificial Sequence
  Description of Artificial Sequence: Synthetic oligonucleotide
ggccaaaccucggcuuaccu

SEQ ID NO: 439 - DNA, 20 bp, Artificial Sequence
  Description of Artificial Sequence: Synthetic oligonucleotide
ggccaaacctcggcttacct

SEQ ID NO: 440 - DNA, 20 bp, Artificial Sequence
  Description of Artificial Sequence: Synthetic oligonucleotide
ggccaaacctcggcttacct

SEQ ID NO: 441 - DNA, 20 bp, Artificial Sequence
  Description of Artificial Sequence: Synthetic oligonucleotide
  Description of Combined DNA/RNA Molecule: Synthetic oligonucleotide
ggccaaaccucggcttacct

SEQ ID NO: 442 - DNA, 20 bp, Artificial Sequence
  Description of Artificial Sequence: Synthetic oligonucleotide
  Description of Combined DNA/RNA Molecule: Synthetic oligonucleotide
ggccaaacctcggcttaccu

SEQ ID NO: 443 - DNA, 20 bp, Artificial Sequence
  Description of Artificial Sequence: Synthetic oligonucleotide
  Description of Combined DNA/RNA Molecule: Synthetic oligonucleotide
ggccaaaccucggctuaccu

SEQ ID NO: 444 - DNA, 20 bp, Artificial Sequence
  Description of Artificial Sequence: Synthetic oligonucleotide
  Description of Combined DNA/RNA Molecule: Synthetic oligonucleotide
ggccaaacctcggcutaccu

SEQ ID NO: 445 - DNA, 20 bp, Artificial Sequence
  Description of Artificial Sequence: Synthetic oligonucleotide
  Description of Combined DNA/RNA Molecule: Synthetic oligonucleotide
ggccaaacctcggctuaccu

SEQ ID NO: 446 - RNA, 20 nt, Artificial Sequence
  Description of Artificial Sequence: Synthetic oligonucleotide
ggccaaaccucggcuuaccu

SEQ ID NO: 447 - DNA, 20 bp, Artificial Sequence
  Description of Artificial Sequence: Synthetic oligonucleotide
  Description of Combined DNA/RNA Molecule: Synthetic oligonucleotide
ggccaaacctcggcutaccu

SEQ ID NO: 448 - DNA, 20 bp, Artificial Sequence
  Description of Artificial Sequence: Synthetic oligonucleotide
  Description of Combined DNA/RNA Molecule: Synthetic oligonucleotide
ggccaaacctcggctuaccu

SEQ ID NO: 449 - DNA, 20 bp, Artificial Sequence
  Description of Artificial Sequence: Synthetic oligonucleotide
  Description of Combined DNA/RNA Molecule: Synthetic oligonucleotide
ggccaaaccucggcttaccu

SEQ ID NO: 450 - DNA, 20 bp, Artificial Sequence
  Description of Artificial Sequence: Synthetic oligonucleotide
  Description of Combined DNA/RNA Molecule: Synthetic oligonucleotide
ggccaaaccucggcttacct

SEQ ID NO: 451 - DNA, 20 bp, Artificial Sequence
  Description of Artificial Sequence: Synthetic oligonucleotide
  Description of Combined DNA/RNA Molecule: Synthetic oligonucleotide
ggccaaacctcggcttaccu

SEQ ID NO: 452 - DNA, 20 bp, Artificial Sequence
  Description of Artificial Sequence: Synthetic oligonucleotide
  Description of Combined DNA/RNA Molecule: Synthetic oligonucleotide
ggccaaaccucggctuaccu

SEQ ID NO: 453 - DNA, 20 bp, Artificial Sequence
  Description of Artificial Sequence: Synthetic oligonucleotide
  Description of Combined DNA/RNA Molecule: Synthetic oligonucleotide
ggccaaacctcggcutaccu

SEQ ID NO: 454 - DNA, 20 bp, Artificial Sequence
  Description of Artificial Sequence: Synthetic oligonucleotide
  Description of Combined DNA/RNA Molecule: Synthetic oligonucleotide
ggccaaacctcggctuaccu

SEQ ID NO: 455 - RNA, 20 nt, Artificial Sequence
  Description of Artificial Sequence: Synthetic oligonucleotide
ggccaaaccucggcuuaccu

SEQ ID NO: 456 - DNA, 20 bp, Artificial Sequence
  Description of Artificial Sequence: Synthetic oligonucleotide
  Description of Combined DNA/RNA Molecule: Synthetic oligonucleotide
ggccaaacctcggcutaccu

SEQ ID NO: 457 - DNA, 20 bp, Artificial Sequence
  Description of Artificial Sequence: Synthetic oligonucleotide
  Description of Combined DNA/RNA Molecule: Synthetic oligonucleotide
ggccaaacctcggctuaccu

SEQ ID NO: 458 - DNA, 20 bp, Artificial Sequence
  Description of Artificial Sequence: Synthetic oligonucleotide
  Description of Combined DNA/RNA Molecule: Synthetic oligonucleotide
ggccaaaccucggcttaccu

SEQ ID NO: 459 - DNA, 20 bp, Artificial Sequence
  Description of Artificial Sequence: Synthetic oligonucleotide
  Description of Combined DNA/RNA Molecule: Synthetic oligonucleotide
ggccaaaccucggcutaccu

SEQ ID NO: 460 - RNA, 20 nt, Artificial Sequence
  Description of Artificial Sequence: Synthetic oligonucleotide
ggccaaaccucggcuuaccu

SEQ ID NO: 461 - RNA, 20 nt, Artificial Sequence
  Description of Artificial Sequence: Synthetic oligonucleotide
ggccaaaccucggcuuaccu

SEQ ID NO: 462 - RNA, 20 nt, Artificial Sequence
  Description of Artificial Sequence: Synthetic oligonucleotide
ggccaaaccucggcuuaccu

SEQ ID NO: 463 - RNA, 20 nt, Artificial Sequence
  Description of Artificial Sequence: Synthetic oligonucleotide
ggccaaaccucggcuuaccu

SEQ ID NO: 464 - RNA, 20 nt, Artificial Sequence
  Description of Artificial Sequence: Synthetic oligonucleotide
ggccaaaccucggcuuaccu

SEQ ID NO: 465 - RNA, 20 nt, Artificial Sequence
  Description of Artificial Sequence: Synthetic oligonucleotide
ggccaaaccucggcuuaccu

SEQ ID NO: 466 - RNA, 20 nt, Artificial Sequence
  Description of Artificial Sequence: Synthetic oligonucleotide
ggccaaaccucggcuuaccu

SEQ ID NO: 467 - RNA, 20 nt, Artificial Sequence
  Description of Artificial Sequence: Synthetic oligonucleotide
ggccaaaccucggcuuaccu

SEQ ID NO: 468 - RNA, 20 nt, Artificial Sequence
  Description of Artificial Sequence: Synthetic oligonucleotide
ggccaaaccucggcuuaccu

SEQ ID NO: 469 - RNA, 20 nt, Artificial Sequence
  Description of Artificial Sequence: Synthetic oligonucleotide
ggccaaaccucggcuuaccu

SEQ ID NO: 470 - RNA, 20 nt, Artificial Sequence
  Description of Artificial Sequence: Synthetic oligonucleotide
ggccaaaccucggcuuaccu

SEQ ID NO: 471 - RNA, 25 nt, Artificial Sequence
  Description of Artificial Sequence: Synthetic oligonucleotide
ggccaaaccucggcuuaccugaaau

SEQ ID NO: 472 - DNA, 20 bp, Artificial Sequence
  Description of Artificial Sequence: Synthetic oligonucleotide
  Description of Combined DNA/RNA Molecule: Synthetic oligonucleotide
ggccaaaccucggcutaccu

SEQ ID NO: 473 - DNA, 20 bp, Artificial Sequence
  Description of Artificial Sequence: Synthetic oligonucleotide
tcaaggaagatggcatttct

SEQ ID NO: 474 - RNA, 20 nt, Artificial Sequence
  Description of Artificial Sequence: Synthetic oligonucleotide
ucaaggaagauggcauuucu

SEQ ID NO: 475 - DNA, 20 bp, Artificial Sequence
  Description of Artificial Sequence: Synthetic oligonucleotide
tcaaggaagatggcatttct

SEQ ID NO: 476 - DNA, 20 bp, Artificial Sequence
  Description of Artificial Sequence: Synthetic oligonucleotide
tcaaggaagatggcatttct

SEQ ID NO: 477 - DNA, 20 bp, Artificial Sequence
  Description of Artificial Sequence: Synthetic oligonucleotide
  Description of Combined DNA/RNA Molecule: Synthetic oligonucleotide
tcaaggaagauggcatttct

SEQ ID NO: 478 - DNA, 20 bp, Artificial Sequence
  Description of Artificial Sequence: Synthetic oligonucleotide
  Description of Combined DNA/RNA Molecule: Synthetic oligonucleotide
ucaaggaagatggcatuucu

SEQ ID NO: 479 - DNA, 20 bp, Artificial Sequence
  Description of Artificial Sequence: Synthetic oligonucleotide
  Description of Combined DNA/RNA Molecule: Synthetic oligonucleotide
tcaaggaagatggcautucu

SEQ ID NO: 480 - DNA, 20 bp, Artificial Sequence
  Description of Artificial Sequence: Synthetic oligonucleotide
  Description of Combined DNA/RNA Molecule: Synthetic oligonucleotide
ucaaggaagauggcatutcu

SEQ ID NO: 481 - DNA, 20 bp, Artificial Sequence
  Description of Artificial Sequence: Synthetic oligonucleotide
  Description of Combined DNA/RNA Molecule: Synthetic oligonucleotide
tcaaggaagatggcauutcu

SEQ ID NO: 482 - DNA, 20 bp, Artificial Sequence
  Description of Artificial Sequence: Synthetic oligonucleotide
  Description of Combined DNA/RNA Molecule: Synthetic oligonucleotide
tcaaggaagauggcauttcu

SEQ ID NO: 483 - DNA, 20 bp, Artificial Sequence
  Description of Artificial Sequence: Synthetic oligonucleotide
  Description of Combined DNA/RNA Molecule: Synthetic oligonucleotide
tcaaggaagatggcatttcu

SEQ ID NO: 484 - DNA, 20 bp, Artificial Sequence
  Description of Artificial Sequence: Synthetic oligonucleotide
  Description of Combined DNA/RNA Molecule: Synthetic oligonucleotide
tcaaggaagatggcauttcu

SEQ ID NO: 485 - DNA, 20 bp, Artificial Sequence
  Description of Artificial Sequence: Synthetic oligonucleotide
  Description of Combined DNA/RNA Molecule: Synthetic oligonucleotide
ucaaggaagauggcatttcu

SEQ ID NO: 486 - DNA, 20 bp, Artificial Sequence
  Description of Artificial Sequence: Synthetic oligonucleotide
  Description of Combined DNA/RNA Molecule: Synthetic oligonucleotide
tcaaggaagatggcatttcu

SEQ ID NO: 487 - DNA, 20 bp, Artificial Sequence
  Description of Artificial Sequence: Synthetic oligonucleotide
  Description of Combined DNA/RNA Molecule: Synthetic oligonucleotide
tcaaggaagauggcatttct

SEQ ID NO: 488 - DNA, 20 bp, Artificial Sequence
  Description of Artificial Sequence: Synthetic oligonucleotide
  Description of Combined DNA/RNA Molecule: Synthetic oligonucleotide
ucaaggaagatggcatuucu

SEQ ID NO: 489 - DNA, 20 bp, Artificial Sequence
  Description of Artificial Sequence: Synthetic oligonucleotide
  Description of Combined DNA/RNA Molecule: Synthetic oligonucleotide
tcaaggaagatggcautucu

SEQ ID NO: 490 - DNA, 20 bp, Artificial Sequence
  Description of Artificial Sequence: Synthetic oligonucleotide
  Description of Combined DNA/RNA Molecule: Synthetic oligonucleotide
ucaaggaagauggcatutcu

SEQ ID NO: 491 - DNA, 20 bp, Artificial Sequence
  Description of Artificial Sequence: Synthetic oligonucleotide
  Description of Combined DNA/RNA Molecule: Synthetic oligonucleotide
tcaaggaagatggcauutcu

SEQ ID NO: 492 - DNA, 20 bp, Artificial Sequence
  Description of Artificial Sequence: Synthetic oligonucleotide
  Description of Combined DNA/RNA Molecule: Synthetic oligonucleotide
tcaaggaagauggcauttcu

SEQ ID NO: 493 - DNA, 20 bp, Artificial Sequence
  Description of Artificial Sequence: Synthetic oligonucleotide
  Description of Combined DNA/RNA Molecule: Synthetic oligonucleotide
tcaaggaagatggcatttcu

SEQ ID NO: 494 - DNA, 20 bp, Artificial Sequence
  Description of Artificial Sequence: Synthetic oligonucleotide
  Description of Combined DNA/RNA Molecule: Synthetic oligonucleotide
tcaaggaagatggcauttcu

SEQ ID NO: 495 - DNA, 20 bp, Artificial Sequence
  Description of Artificial Sequence: Synthetic oligonucleotide
  Description of Combined DNA/RNA Molecule: Synthetic oligonucleotide
ucaaggaagauggcatttcu

SEQ ID NO: 496 - DNA, 20 bp, Artificial Sequence
  Description of Artificial Sequence: Synthetic oligonucleotide
  Description of Combined DNA/RNA Molecule: Synthetic oligonucleotide
tcaaggaagatggcatttcu

SEQ ID NO: 497 - RNA, 20 nt, Artificial Sequence
  Description of Artificial Sequence: Synthetic oligonucleotide
ucaaggaagauggcauuucu

SEQ ID NO: 498 - RNA, 20 nt, Artificial Sequence
  Description of Artificial Sequence: Synthetic oligonucleotide
ucaaggaagauggcauuucu

SEQ ID NO: 499 - RNA, 20 nt, Artificial Sequence
  Description of Artificial Sequence: Synthetic oligonucleotide
ucaaggaagauggcauuucu

SEQ ID NO: 500 - RNA, 20 nt, Artificial Sequence
  Description of Artificial Sequence: Synthetic oligonucleotide
ucaaggaagauggcauuucu

SEQ ID NO: 501 - RNA, 20 nt, Artificial Sequence
  Description of Artificial Sequence: Synthetic oligonucleotide
ucaaggaagauggcauuucu

SEQ ID NO: 502 - RNA, 20 nt, Artificial Sequence
  Description of Artificial Sequence: Synthetic oligonucleotide
ucaaggaagauggcauuucu

SEQ ID NO: 503 - RNA, 20 nt, Artificial Sequence
  Description of Artificial Sequence: Synthetic oligonucleotide
ucaaggaagauggcauuucu

SEQ ID NO: 504 - RNA, 20 nt, Artificial Sequence
  Description of Artificial Sequence: Synthetic oligonucleotide
ucaaggaagauggcauuucu

SEQ ID NO: 505 - RNA, 20 nt, Artificial Sequence
  Description of Artificial Sequence: Synthetic oligonucleotide
ucaaggaagauggcauuucu

SEQ ID NO: 506 - RNA, 20 nt, Artificial Sequence
  Description of Artificial Sequence: Synthetic oligonucleotide
ucaaggaagauggcauuucu

SEQ ID NO: 507 - RNA, 20 nt, Artificial Sequence
  Description of Artificial Sequence: Synthetic oligonucleotide
agaaaugccaucuuccuuga

SEQ ID NO: 508 - RNA, 20 nt, Artificial Sequence
  Description of Artificial Sequence: Synthetic oligonucleotide
ucaaggaagauggcauuucu

SEQ ID NO: 509 - RNA, 20 nt, Artificial Sequence
  Description of Artificial Sequence: Synthetic oligonucleotide
ucaaggaagauggcauuucu

SEQ ID NO: 510 - RNA, 20 nt, Artificial Sequence
  Description of Artificial Sequence: Synthetic oligonucleotide
ucaaggaagauggcauuucu

SEQ ID NO: 511 - RNA, 20 nt, Artificial Sequence
  Description of Artificial Sequence: Synthetic oligonucleotide
ucaaggaagauggcauuucu

SEQ ID NO: 512 - RNA, 20 nt, Artificial Sequence
  Description of Artificial Sequence: Synthetic oligonucleotide
ucaaggaagauggcauuucu

SEQ ID NO: 513 - RNA, 20 nt, Artificial Sequence
  Description of Artificial Sequence: Synthetic oligonucleotide
ucaaggaagauggcauuucu

SEQ ID NO: 514 - RNA, 20 nt, Artificial Sequence
  Description of Artificial Sequence: Synthetic oligonucleotide
ucaaggaagauggcauuucu

SEQ ID NO: 515 - RNA, 20 nt, Artificial Sequence
  Description of Artificial Sequence: Synthetic oligonucleotide
ucaaggaagauggcauuucu

SEQ ID NO: 516 - RNA, 20 nt, Artificial Sequence
  Description of Artificial Sequence: Synthetic oligonucleotide
ucaaggaagauggcauuucu

SEQ ID NO: 517 - RNA, 20 nt, Artificial Sequence
  Description of Artificial Sequence: Synthetic oligonucleotide
ucaaggaagauggcauuucu

SEQ ID NO: 518 - RNA, 20 nt, Artificial Sequence
  Description of Artificial Sequence: Synthetic oligonucleotide
ucaaggaagauggcauuucu

SEQ ID NO: 519 - RNA, 20 nt, Artificial Sequence
  Description of Artificial Sequence: Synthetic oligonucleotide
ucaaggaagauggcauuucu

SEQ ID NO: 520 - RNA, 20 nt, Artificial Sequence
  Description of Artificial Sequence: Synthetic oligonucleotide
ucaaggaagauggcauuucu

SEQ ID NO: 521 - RNA, 20 nt, Artificial Sequence
  Description of Artificial Sequence: Synthetic oligonucleotide
ucaaggaagauggcauuucu

SEQ ID NO: 522 - RNA, 20 nt, Artificial Sequence
  Description of Artificial Sequence: Synthetic oligonucleotide
ucaaggaagauggcauuucu

SEQ ID NO: 523 - RNA, 20 nt, Artificial Sequence
  Description of Artificial Sequence: Synthetic oligonucleotide
ucaaggaagauggcauuucu

SEQ ID NO: 524 - RNA, 20 nt, Artificial Sequence
  Description of Artificial Sequence: Synthetic oligonucleotide
ucaaggaagauggcauuucu

SEQ ID NO: 525 - RNA, 20 nt, Artificial Sequence
  Description of Artificial Sequence: Synthetic oligonucleotide
ucaaggaagauggcauuucu

SEQ ID NO: 526 - RNA, 20 nt, Artificial Sequence
  Description of Artificial Sequence: Synthetic oligonucleotide
ucaaggaagauggcauuucu

SEQ ID NO: 527 - RNA, 20 nt, Artificial Sequence
  Description of Artificial Sequence: Synthetic oligonucleotide
ucaaggaagauggcauuucu

SEQ ID NO: 528 - RNA, 20 nt, Artificial Sequence
  Description of Artificial Sequence: Synthetic oligonucleotide
ucaaggaagauggcauuucu

SEQ ID NO: 529 - RNA, 20 nt, Artificial Sequence
  Description of Artificial Sequence: Synthetic oligonucleotide
ucaaggaagauggcauuucu

SEQ ID NO: 530 - RNA, 20 nt, Artificial Sequence
  Description of Artificial Sequence: Synthetic oligonucleotide
ucaaggaagauggcauuucu

SEQ ID NO: 531 - RNA, 20 nt, Artificial Sequence
  Description of Artificial Sequence: Synthetic oligonucleotide
ucaaggaagauggcauuucu

SEQ ID NO: 532 - RNA, 20 nt, Artificial Sequence
  Description of Artificial Sequence: Synthetic oligonucleotide
ucaaggaagauggcauuucu

SEQ ID NO: 533 - RNA, 20 nt, Artificial Sequence
  Description of Artificial Sequence: Synthetic oligonucleotide
ucaaggaagauggcauuucu

SEQ ID NO: 534 - RNA, 20 nt, Artificial Sequence
  Description of Artificial Sequence: Synthetic oligonucleotide
ucaaggaagauggcauuucu

SEQ ID NO: 535 - RNA, 20 nt, Artificial Sequence
  Description of Artificial Sequence: Synthetic oligonucleotide
ucaaggaagauggcauuucu

SEQ ID NO: 536 - RNA, 20 nt, Artificial Sequence
  Description of Artificial Sequence: Synthetic oligonucleotide
ucaaggaagauggcauuucu

SEQ ID NO: 537 - RNA, 20 nt, Artificial Sequence
  Description of Artificial Sequence: Synthetic oligonucleotide
ucaaggaagauggcauuucu

SEQ ID NO: 538 - RNA, 20 nt, Artificial Sequence
  Description of Artificial Sequence: Synthetic oligonucleotide
ucaaggaagauggcauuucu

SEQ ID NO: 539 - RNA, 20 nt, Artificial Sequence
  Description of Artificial Sequence: Synthetic oligonucleotide
ucaaggaagauggcauuucu

SEQ ID NO: 540 - RNA, 20 nt, Artificial Sequence
  Description of Artificial Sequence: Synthetic oligonucleotide
ucaaggaagauggcauuucu

SEQ ID NO: 541 - RNA, 20 nt, Artificial Sequence
  Description of Artificial Sequence: Synthetic oligonucleotide
ucaaggaagauggcauuucu

SEQ ID NO: 542 - RNA, 20 nt, Artificial Sequence
  Description of Artificial Sequence: Synthetic oligonucleotide
ucaaggaagauggcauuucu

SEQ ID NO: 543 - RNA, 20 nt, Artificial Sequence
  Description of Artificial Sequence: Synthetic oligonucleotide
ucaaggaagauggcauuucu

SEQ ID NO: 544 - RNA, 20 nt, Artificial Sequence
  Description of Artificial Sequence: Synthetic oligonucleotide
ucaaggaagauggcauuucu

SEQ ID NO: 545 - RNA, 20 nt, Artificial Sequence
  Description of Artificial Sequence: Synthetic oligonucleotide
ucaaggaagauggcauuucu

SEQ ID NO: 546 - RNA, 20 nt, Artificial Sequence
  Description of Artificial Sequence: Synthetic oligonucleotide
ucaaggaagauggcauuucu

SEQ ID NO: 547 - RNA, 20 nt, Artificial Sequence
  Description of Artificial Sequence: Synthetic oligonucleotide
ucaaggaagauggcauuucu

SEQ ID NO: 548 - RNA, 20 nt, Artificial Sequence
  Description of Artificial Sequence: Synthetic oligonucleotide
ucaaggaagauggcauuucu

SEQ ID NO: 549 - RNA, 20 nt, Artificial Sequence
  Description of Artificial Sequence: Synthetic oligonucleotide
ucaaggaagauggcauuucu

SEQ ID NO: 550 - RNA, 20 nt, Artificial Sequence
  Description of Artificial Sequence: Synthetic oligonucleotide
ucaaggaagauggcauuucu

SEQ ID NO: 551 - RNA, 20 nt, Artificial Sequence
  Description of Artificial Sequence: Synthetic oligonucleotide
ucaaggaagauggcauuucu

SEQ ID NO: 552 - RNA, 20 nt, Artificial Sequence
  Description of Artificial Sequence: Synthetic oligonucleotide
ucaaggaagauggcauuucu

SEQ ID NO: 553 - RNA, 20 nt, Artificial Sequence
  Description of Artificial Sequence: Synthetic oligonucleotide
ucaaggaagauggcauuucu

SEQ ID NO: 554 - RNA, 20 nt, Artificial Sequence
  Description of Artificial Sequence: Synthetic oligonucleotide
ucaaggaagauggcauuucu

SEQ ID NO: 555 - RNA, 20 nt, Artificial Sequence
  Description of Artificial Sequence: Synthetic oligonucleotide
ucaaggaagauggcauuucu

SEQ ID NO: 556 - RNA, 20 nt, Artificial Sequence
  Description of Artificial Sequence: Synthetic oligonucleotide
ucaaggaagauggcauuucu

SEQ ID NO: 557 - RNA, 20 nt, Artificial Sequence
  Description of Artificial Sequence: Synthetic oligonucleotide
ucaaggaagauggcauuucu

SEQ ID NO: 558 - RNA, 20 nt, Artificial Sequence
  Description of Artificial Sequence: Synthetic oligonucleotide
ucaaggaagauggcauuucu

SEQ ID NO: 559 - RNA, 20 nt, Artificial Sequence
  Description of Artificial Sequence: Synthetic oligonucleotide
ucaaggaagauggcauuucu

SEQ ID NO: 560 - RNA, 20 nt, Artificial Sequence
  Description of Artificial Sequence: Synthetic oligonucleotide
ucaaggaagauggcauuucu

SEQ ID NO: 561 - RNA, 20 nt, Artificial Sequence
  Description of Artificial Sequence: Synthetic oligonucleotide
ucaaggaagauggcauuucu

SEQ ID NO: 562 - RNA, 20 nt, Artificial Sequence
  Description of Artificial Sequence: Synthetic oligonucleotide
ucaaggaagauggcauuucu

SEQ ID NO: 563 - RNA, 20 nt, Artificial Sequence
  Description of Artificial Sequence: Synthetic oligonucleotide
ucaaggaagauggcauuucu

SEQ ID NO: 564 - RNA, 20 nt, Artificial Sequence
  Description of Artificial Sequence: Synthetic oligonucleotide
ucaaggaagauggcauuucu

SEQ ID NO: 565 - RNA, 20 nt, Artificial Sequence
  Description of Artificial Sequence: Synthetic oligonucleotide
ucaaggaagauggcauuucu

SEQ ID NO: 566 - RNA, 20 nt, Artificial Sequence
  Description of Artificial Sequence: Synthetic oligonucleotide
ucaaggaagauggcauuucu

SEQ ID NO: 567 - RNA, 20 nt, Artificial Sequence
  Description of Artificial Sequence: Synthetic oligonucleotide
ucaaggaagauggcauuucu

SEQ ID NO: 568 - RNA, 20 nt, Artificial Sequence
  Description of Artificial Sequence: Synthetic oligonucleotide
ucaaggaagauggcauuucu

SEQ ID NO: 569 - RNA, 20 nt, Artificial Sequence
  Description of Artificial Sequence: Synthetic oligonucleotide
ucaaggaagauggcauuucu

SEQ ID NO: 570 - RNA, 20 nt, Artificial Sequence
  Description of Artificial Sequence: Synthetic oligonucleotide
ucaaggaagauggcauuucu

SEQ ID NO: 571 - RNA, 20 nt, Artificial Sequence
  Description of Artificial Sequence: Synthetic oligonucleotide
ucaaggaagauggcauuucu

SEQ ID NO: 572 - RNA, 20 nt, Artificial Sequence
  Description of Artificial Sequence: Synthetic oligonucleotide
ucaaggaagauggcauuucu

SEQ ID NO: 573 - RNA, 20 nt, Artificial Sequence
  Description of Artificial Sequence: Synthetic oligonucleotide
ucaaggaagauggcauuucu

SEQ ID NO: 574 - RNA, 20 nt, Artificial Sequence
  Description of Artificial Sequence: Synthetic oligonucleotide
ucaaggaagauggcauuucu

SEQ ID NO: 575 - RNA, 20 nt, Artificial Sequence
  Description of Artificial Sequence: Synthetic oligonucleotide
ucaaggaagauggcauuucu

SEQ ID NO: 576 - RNA, 20 nt, Artificial Sequence
  Description of Artificial Sequence: Synthetic oligonucleotide
ucaaggaagauggcauuucu

SEQ ID NO: 577 - RNA, 20 nt, Artificial Sequence
  Description of Artificial Sequence: Synthetic oligonucleotide
ucaaggaagauggcauuucu

SEQ ID NO: 578 - RNA, 20 nt, Artificial Sequence
  Description of Artificial Sequence: Synthetic oligonucleotide
ucaaggaagauggcauuucu

SEQ ID NO: 579 - RNA, 20 nt, Artificial Sequence
  Description of Artificial Sequence: Synthetic oligonucleotide
ucaaggaagauggcauuucu

SEQ ID NO: 580 - RNA, 20 nt, Artificial Sequence
  Description of Artificial Sequence: Synthetic oligonucleotide
ucaaggaagauggcauuucu

SEQ ID NO: 581 - RNA, 20 nt, Artificial Sequence
  Description of Artificial Sequence: Synthetic oligonucleotide
ucaaggaagauggcauuucu

SEQ ID NO: 582 - RNA, 20 nt, Artificial Sequence
  Description of Artificial Sequence: Synthetic oligonucleotide
ucaaggaagauggcauuucu

SEQ ID NO: 583 - RNA, 20 nt, Artificial Sequence
  Description of Artificial Sequence: Synthetic oligonucleotide
ucaaggaagauggcauuucu

SEQ ID NO: 584 - RNA, 20 nt, Artificial Sequence
  Description of Artificial Sequence: Synthetic oligonucleotide
ucaaggaagauggcauuucu

SEQ ID NO: 585 - RNA, 20 nt, Artificial Sequence
  Description of Artificial Sequence: Synthetic oligonucleotide
ucaaggaagauggcauuucu

SEQ ID NO: 586 - RNA, 20 nt, Artificial Sequence
  Description of Artificial Sequence: Synthetic oligonucleotide
ucaaggaagauggcauuucu

SEQ ID NO: 587 - RNA, 20 nt, Artificial Sequence
  Description of Artificial Sequence: Synthetic oligonucleotide
ucaaggaagauggcauuucu

SEQ ID NO: 588 - RNA, 20 nt, Artificial Sequence
  Description of Artificial Sequence: Synthetic oligonucleotide
ucaaggaagauggcauuucu

SEQ ID NO: 589 - RNA, 20 nt, Artificial Sequence
  Description of Artificial Sequence: Synthetic oligonucleotide
ucaaggaagauggcauuucu

SEQ ID NO: 590 - RNA, 20 nt, Artificial Sequence
  Description of Artificial Sequence: Synthetic oligonucleotide
ucaaggaagauggcauuucu

SEQ ID NO: 591 - RNA, 20 nt, Artificial Sequence
  Description of Artificial Sequence: Synthetic oligonucleotide
ucaaggaagauggcauuucu

SEQ ID NO: 592 - RNA, 20 nt, Artificial Sequence
  Description of Artificial Sequence: Synthetic oligonucleotide
ucaaggaagauggcauuucu

SEQ ID NO: 593 - RNA, 20 nt, Artificial Sequence
  Description of Artificial Sequence: Synthetic oligonucleotide
ucaaggaagauggcauuucu

SEQ ID NO: 594 - RNA, 20 nt, Artificial Sequence
  Description of Artificial Sequence: Synthetic oligonucleotide
ucaaggaagauggcauuucu

SEQ ID NO: 595 - RNA, 20 nt, Artificial Sequence
  Description of Artificial Sequence: Synthetic oligonucleotide
ucaaggaagauggcauuucu

SEQ ID NO: 596 - RNA, 20 nt, Artificial Sequence
  Description of Artificial Sequence: Synthetic oligonucleotide
ucaaggaagauggcauuucu

SEQ ID NO: 597 - RNA, 20 nt, Artificial Sequence
  Description of Artificial Sequence: Synthetic oligonucleotide
ucaaggaagauggcauuucu

SEQ ID NO: 598 - RNA, 20 nt, Artificial Sequence
  Description of Artificial Sequence: Synthetic oligonucleotide
ucaaggaagauggcauuucu

SEQ ID NO: 599 - RNA, 20 nt, Artificial Sequence
  Description of Artificial Sequence: Synthetic oligonucleotide
ucaaggaagauggcauuucu

SEQ ID NO: 600 - RNA, 20 nt, Artificial Sequence
  Description of Artificial Sequence: Synthetic oligonucleotide
ucaaggaagauggcauuucu

SEQ ID NO: 601 - RNA, 20 nt, Artificial Sequence
  Description of Artificial Sequence: Synthetic oligonucleotide
ucaaggaagauggcauuucu

SEQ ID NO: 602 - RNA, 20 nt, Artificial Sequence
  Description of Artificial Sequence: Synthetic oligonucleotide
ucaaggaagauggcauuucu

SEQ ID NO: 603 - RNA, 20 nt, Artificial Sequence
  Description of Artificial Sequence: Synthetic oligonucleotide
ucaaggaagauggcauuucu

SEQ ID NO: 604 - RNA, 20 nt, Artificial Sequence
  Description of Artificial Sequence: Synthetic oligonucleotide
ucaaggaagauggcauuucu

SEQ ID NO: 605 - RNA, 20 nt, Artificial Sequence
  Description of Artificial Sequence: Synthetic oligonucleotide
ucaaggaagauggcauuucu

SEQ ID NO: 606 - DNA, 20 bp, Artificial Sequence
  Description of Artificial Sequence: Synthetic oligonucleotide
  Description of Combined DNA/RNA Molecule: Synthetic oligonucleotide
ucaaggaagatggcauuucu

SEQ ID NO: 607 - DNA, 20 bp, Artificial Sequence
  Description of Artificial Sequence: Synthetic oligonucleotide
  Description of Combined DNA/RNA Molecule: Synthetic oligonucleotide
ucaaggaagatggcauuucu

SEQ ID NO: 608 - DNA, 20 bp, Artificial Sequence
  Description of Artificial Sequence: Synthetic oligonucleotide
  Description of Combined DNA/RNA Molecule: Synthetic oligonucleotide
ucaaggaagatggcauuucu

SEQ ID NO: 609 - DNA, 20 bp, Artificial Sequence
  Description of Artificial Sequence: Synthetic oligonucleotide
  Description of Combined DNA/RNA Molecule: Synthetic oligonucleotide
ucaaggaagatggcauuucu

SEQ ID NO: 610 - DNA, 20 bp, Artificial Sequence
  Description of Artificial Sequence: Synthetic oligonucleotide
  Description of Combined DNA/RNA Molecule: Synthetic oligonucleotide
ucaaggaagatggcauuucu

SEQ ID NO: 611 - DNA, 20 bp, Artificial Sequence
  Description of Artificial Sequence: Synthetic oligonucleotide
  Description of Combined DNA/RNA Molecule: Synthetic oligonucleotide
ucaaggaagatggcauuucu

SEQ ID NO: 612 - DNA, 20 bp, Artificial Sequence
  Description of Artificial Sequence: Synthetic oligonucleotide
  Description of Combined DNA/RNA Molecule: Synthetic oligonucleotide
ucaaggaagatggcauuucu

SEQ ID NO: 613 - RNA, 20 nt, Artificial Sequence
  Description of Artificial Sequence: Synthetic oligonucleotide
ucaaggaagauggcauuucu

SEQ ID NO: 614 - RNA, 20 nt, Artificial Sequence
  Description of Artificial Sequence: Synthetic oligonucleotide
ucaaggaagauggcauuucu

SEQ ID NO: 615 - RNA, 20 nt, Artificial Sequence
  Description of Artificial Sequence: Synthetic oligonucleotide
ucaaggaagauggcauuucu

SEQ ID NO: 616 - RNA, 20 nt, Artificial Sequence
  Description of Artificial Sequence: Synthetic oligonucleotide
ucaaggaagauggcauuucu

SEQ ID NO: 617 - RNA, 20 nt, Artificial Sequence
  Description of Artificial Sequence: Synthetic oligonucleotide
ucaaggaagauggcauuucu

SEQ ID NO: 618 - RNA, 20 nt, Artificial Sequence
  Description of Artificial Sequence: Synthetic oligonucleotide
ucaaggaagauggcauuucu

SEQ ID NO: 619 - RNA, 20 nt, Artificial Sequence
  Description of Artificial Sequence: Synthetic oligonucleotide
ucaaggaagauggcauuucu

SEQ ID NO: 620 - RNA, 20 nt, Artificial Sequence
  Description of Artificial Sequence: Synthetic oligonucleotide
ucaaggaagauggcauuucu

SEQ ID NO: 621 - RNA, 20 nt, Artificial Sequence
  Description of Artificial Sequence: Synthetic oligonucleotide
ucaaggaagauggcauuucu

SEQ ID NO: 622 - RNA, 20 nt, Artificial Sequence
  Description of Artificial Sequence: Synthetic oligonucleotide
ucaaggaagauggcauuucu

SEQ ID NO: 623 - RNA, 20 nt, Artificial Sequence
  Description of Artificial Sequence: Synthetic oligonucleotide
ucaaggaagauggcauuucu

SEQ ID NO: 624 - RNA, 20 nt, Artificial Sequence
  Description of Artificial Sequence: Synthetic oligonucleotide
ucaaggaagauggcauuucu

SEQ ID NO: 625 - RNA, 20 nt, Artificial Sequence
  Description of Artificial Sequence: Synthetic oligonucleotide
ucaaggaagauggcauuucu

SEQ ID NO: 626 - RNA, 20 nt, Artificial Sequence
  Description of Artificial Sequence: Synthetic oligonucleotide
ucaaggaagauggcauuucu

SEQ ID NO: 627 - RNA, 20 nt, Artificial Sequence
  Description of Artificial Sequence: Synthetic oligonucleotide
ucaaggaagauggcauuucu

SEQ ID NO: 628 - RNA, 20 nt, Artificial Sequence
  Description of Artificial Sequence: Synthetic oligonucleotide
ucaaggaagauggcauuucu

SEQ ID NO: 629 - RNA, 20 nt, Artificial Sequence
  Description of Artificial Sequence: Synthetic oligonucleotide
ucaaggaagauggcauuucu

SEQ ID NO: 630 - RNA, 20 nt, Artificial Sequence
  Description of Artificial Sequence: Synthetic oligonucleotide
ucaaggaagauggcauuucu

SEQ ID NO: 631 - RNA, 20 nt, Artificial Sequence
  Description of Artificial Sequence: Synthetic oligonucleotide
ucaaggaagauggcauuucu

SEQ ID NO: 632 - RNA, 20 nt, Artificial Sequence
  Description of Artificial Sequence: Synthetic oligonucleotide
ucaaggaagauggcauuucu

SEQ ID NO: 633 - RNA, 20 nt, Artificial Sequence
  Description of Artificial Sequence: Synthetic oligonucleotide
ucaaggaagauggcauuucu

SEQ ID NO: 634 - RNA, 20 nt, Artificial Sequence
  Description of Artificial Sequence: Synthetic oligonucleotide
ucaaggaagauggcauuucu

SEQ ID NO: 635 - RNA, 20 nt, Artificial Sequence
  Description of Artificial Sequence: Synthetic oligonucleotide
ucaaggaagauggcauuucu

SEQ ID NO: 636 - RNA, 20 nt, Artificial Sequence
  Description of Artificial Sequence: Synthetic oligonucleotide
ucaaggaagauggcauuucu

SEQ ID NO: 637 - RNA, 20 nt, Artificial Sequence
  Description of Artificial Sequence: Synthetic oligonucleotide
ucaaggaagauggcauuucu

SEQ ID NO: 638 - RNA, 20 nt, Artificial Sequence
  Description of Artificial Sequence: Synthetic oligonucleotide
ucaaggaagauggcauuucu

SEQ ID NO: 639 - RNA, 20 nt, Artificial Sequence
  Description of Artificial Sequence: Synthetic oligonucleotide
ucaaggaagauggcauuucu

SEQ ID NO: 640 - RNA, 20 nt, Artificial Sequence
  Description of Artificial Sequence: Synthetic oligonucleotide
ucaaggaagauggcauuucu

SEQ ID NO: 641 - RNA, 20 nt, Artificial Sequence
  Description of Artificial Sequence: Synthetic oligonucleotide
ucaaggaagauggcauuucu

SEQ ID NO: 642 - RNA, 20 nt, Artificial Sequence
  Description of Artificial Sequence: Synthetic oligonucleotide
ucaaggaagauggcauuucu

SEQ ID NO: 643 - RNA, 20 nt, Artificial Sequence
  Description of Artificial Sequence: Synthetic oligonucleotide
ucaaggaagauggcauuucu

SEQ ID NO: 644 - RNA, 20 nt, Artificial Sequence
  Description of Artificial Sequence: Synthetic oligonucleotide
ucaaggaagauggcauuucu

SEQ ID NO: 645 - RNA, 20 nt, Artificial Sequence
  Description of Artificial Sequence: Synthetic oligonucleotide
ucaaggaagauggcauuucu

SEQ ID NO: 646 - RNA, 20 nt, Artificial Sequence
  Description of Artificial Sequence: Synthetic oligonucleotide
ucaaggaagauggcauuucu

SEQ ID NO: 647 - RNA, 20 nt, Artificial Sequence
  Description of Artificial Sequence: Synthetic oligonucleotide
ucaaggaagauggcauuucu

SEQ ID NO: 648 - RNA, 20 nt, Artificial Sequence
  Description of Artificial Sequence: Synthetic oligonucleotide
ucaaggaagauggcauuucu

SEQ ID NO: 649 - RNA, 20 nt, Artificial Sequence
  Description of Artificial Sequence: Synthetic oligonucleotide
ucaaggaagauggcauuucu

SEQ ID NO: 650 - RNA, 20 nt, Artificial Sequence
  Description of Artificial Sequence: Synthetic oligonucleotide
ucaaggaagauggcauuucu

SEQ ID NO: 651 - RNA, 20 nt, Artificial Sequence
  Description of Artificial Sequence: Synthetic oligonucleotide
ucaaggaagauggcauuucu

SEQ ID NO: 652 - RNA, 20 nt, Artificial Sequence
  Description of Artificial Sequence: Synthetic oligonucleotide
ucaaggaagauggcauuucu

SEQ ID NO: 653 - RNA, 20 nt, Artificial Sequence
  Description of Artificial Sequence: Synthetic oligonucleotide
ucaaggaagauggcauuucu

SEQ ID NO: 654 - RNA, 20 nt, Artificial Sequence
  Description of Artificial Sequence: Synthetic oligonucleotide
ucaaggaagauggcauuucu

SEQ ID NO: 655 - RNA, 20 nt, Artificial Sequence
  Description of Artificial Sequence: Synthetic oligonucleotide
ucaaggaagauggcauuucu

SEQ ID NO: 656 - RNA, 20 nt, Artificial Sequence
  Description of Artificial Sequence: Synthetic oligonucleotide
ucaaggaagauggcauuucu

SEQ ID NO: 657 - RNA, 20 nt, Artificial Sequence
  Description of Artificial Sequence: Synthetic oligonucleotide
ucaaggaagauggcauuucu

SEQ ID NO: 658 - RNA, 20 nt, Artificial Sequence
  Description of Artificial Sequence: Synthetic oligonucleotide
ucaaggaagauggcauuucu

SEQ ID NO: 659 - RNA, 20 nt, Artificial Sequence
  Description of Artificial Sequence: Synthetic oligonucleotide
ucaaggaagauggcauuucu

SEQ ID NO: 660 - RNA, 20 nt, Artificial Sequence
  Description of Artificial Sequence: Synthetic oligonucleotide
ucaaggaagauggcauuucu

SEQ ID NO: 661 - RNA, 20 nt, Artificial Sequence
  Description of Artificial Sequence: Synthetic oligonucleotide
ucaaggaagauggcauuucu

SEQ ID NO: 662 - RNA, 20 nt, Artificial Sequence
  Description of Artificial Sequence: Synthetic oligonucleotide
ucaaggaagauggcauuucu

SEQ ID NO: 663 - RNA, 20 nt, Artificial Sequence
  Description of Artificial Sequence: Synthetic oligonucleotide
ucaaggaagauggcauuucu

SEQ ID NO: 664 - RNA, 20 nt, Artificial Sequence
  Description of Artificial Sequence: Synthetic oligonucleotide
ucaaggaagauggcauuucu

SEQ ID NO: 665 - RNA, 20 nt, Artificial Sequence
  Description of Artificial Sequence: Synthetic oligonucleotide
ucaaggaagauggcauuucu

SEQ ID NO: 666 - RNA, 20 nt, Artificial Sequence
  Description of Artificial Sequence: Synthetic oligonucleotide
ucaaggaagauggcauuucu

SEQ ID NO: 667 - RNA, 20 nt, Artificial Sequence
  Description of Artificial Sequence: Synthetic oligonucleotide
ucaaggaagauggcauuucu

SEQ ID NO: 668 - RNA, 20 nt, Artificial Sequence
  Description of Artificial Sequence: Synthetic oligonucleotide
ucaaggaagauggcauuucu

SEQ ID NO: 669 - RNA, 20 nt, Artificial Sequence
  Description of Artificial Sequence: Synthetic oligonucleotide
ucaaggaagauggcauuucu

SEQ ID NO: 670 - RNA, 20 nt, Artificial Sequence
  Description of Artificial Sequence: Synthetic oligonucleotide
ucaaggaagauggcauuucu

SEQ ID NO: 671 - RNA, 20 nt, Artificial Sequence
  Description of Artificial Sequence: Synthetic oligonucleotide
ucaaggaagauggcauuucu

SEQ ID NO: 672 - RNA, 20 nt, Artificial Sequence
  Description of Artificial Sequence: Synthetic oligonucleotide
ucaaggaagauggcauuucu

SEQ ID NO: 673 - RNA, 20 nt, Artificial Sequence
  Description of Artificial Sequence: Synthetic oligonucleotide
ucaaggaagauggcauuucu

SEQ ID NO: 674 - RNA, 20 nt, Artificial Sequence
  Description of Artificial Sequence: Synthetic oligonucleotide
ucaaggaagauggcauuucu

SEQ ID NO: 675 - RNA, 20 nt, Artificial Sequence
  Description of Artificial Sequence: Synthetic oligonucleotide
ucaaggaagauggcauuucu

SEQ ID NO: 676 - RNA, 20 nt, Artificial Sequence
  Description of Artificial Sequence: Synthetic oligonucleotide
ucaaggaagauggcauuucu

SEQ ID NO: 677 - RNA, 20 nt, Artificial Sequence
  Description of Artificial Sequence: Synthetic oligonucleotide
ucaaggaagauggcauuucu

SEQ ID NO: 678 - RNA, 20 nt, Artificial Sequence
  Description of Artificial Sequence: Synthetic oligonucleotide
ucaaggaagauggcauuucu

SEQ ID NO: 679 - RNA, 20 nt, Artificial Sequence
  Description of Artificial Sequence: Synthetic oligonucleotide
ucaaggaagauggcauuucu

SEQ ID NO: 680 - RNA, 20 nt, Artificial Sequence
  Description of Artificial Sequence: Synthetic oligonucleotide
ucaaggaagauggcauuucu

SEQ ID NO: 681 - RNA, 20 nt, Artificial Sequence
  Description of Artificial Sequence: Synthetic oligonucleotide
ucaaggaagauggcauuucu

SEQ ID NO: 682 - RNA, 20 nt, Artificial Sequence
  Description of Artificial Sequence: Synthetic oligonucleotide
ucaaggaagauggcauuucu

SEQ ID NO: 683 - RNA, 20 nt, Artificial Sequence
  Description of Artificial Sequence: Synthetic oligonucleotide
ucaaggaagauggcauuucu

SEQ ID NO: 684 - RNA, 20 nt, Artificial Sequence
  Description of Artificial Sequence: Synthetic oligonucleotide
ucaaggaagauggcauuucu

SEQ ID NO: 685 - RNA, 20 nt, Artificial Sequence
  Description of Artificial Sequence: Synthetic oligonucleotide
ucaaggaagauggcauuucu

SEQ ID NO: 686 - RNA, 20 nt, Artificial Sequence
  Description of Artificial Sequence: Synthetic oligonucleotide
ucaaggaagauggcauuucu

SEQ ID NO: 687 - RNA, 20 nt, Artificial Sequence
  Description of Artificial Sequence: Synthetic oligonucleotide
ucaaggaagauggcauuucu

SEQ ID NO: 688 - RNA, 20 nt, Artificial Sequence
  Description of Artificial Sequence: Synthetic oligonucleotide
ucaaggaagauggcauuucu

SEQ ID NO: 689 - RNA, 20 nt, Artificial Sequence
  Description of Artificial Sequence: Synthetic oligonucleotide
ucaaggaagauggcauuucu

SEQ ID NO: 690 - RNA, 20 nt, Artificial Sequence
  Description of Artificial Sequence: Synthetic oligonucleotide
ucaaggaagauggcauuucu

SEQ ID NO: 691 - RNA, 20 nt, Artificial Sequence
  Description of Artificial Sequence: Synthetic oligonucleotide
ucaaggaagauggcauuucu

SEQ ID NO: 692 - RNA, 20 nt, Artificial Sequence
  Description of Artificial Sequence: Synthetic oligonucleotide
ucaaggaagauggcauuucu

SEQ ID NO: 693 - RNA, 20 nt, Artificial Sequence
  Description of Artificial Sequence: Synthetic oligonucleotide
ucaaggaagauggcauuucu

SEQ ID NO: 694 - RNA, 20 nt, Artificial Sequence
  Description of Artificial Sequence: Synthetic oligonucleotide
ucaaggaagauggcauuucu

SEQ ID NO: 695 - RNA, 20 nt, Artificial Sequence
  Description of Artificial Sequence: Synthetic oligonucleotide
ucaaggaagauggcauuucu

SEQ ID NO: 696 - RNA, 20 nt, Artificial Sequence
  Description of Artificial Sequence: Synthetic oligonucleotide
ucaaggaagauggcauuucu

SEQ ID NO: 697 - RNA, 20 nt, Artificial Sequence
  Description of Artificial Sequence: Synthetic oligonucleotide
ucaaggaagauggcauuucu

SEQ ID NO: 698 - RNA, 20 nt, Artificial Sequence
  Description of Artificial Sequence: Synthetic oligonucleotide
ucaaggaagauggcauuucu

SEQ ID NO: 699 - RNA, 20 nt, Artificial Sequence
  Description of Artificial Sequence: Synthetic oligonucleotide
ucaaggaagauggcauuucu

SEQ ID NO: 700 - RNA, 20 nt, Artificial Sequence
  Description of Artificial Sequence: Synthetic oligonucleotide
ucaaggaagauggcauuucu

SEQ ID NO: 701 - RNA, 20 nt, Artificial Sequence
  Description of Artificial Sequence: Synthetic oligonucleotide
ucaaggaagauggcauuucu

SEQ ID NO: 702 - RNA, 20 nt, Artificial Sequence
  Description of Artificial Sequence: Synthetic oligonucleotide
ucaaggaagauggcauuucu

SEQ ID NO: 703 - RNA, 20 nt, Artificial Sequence
  Description of Artificial Sequence: Synthetic oligonucleotide
ucaaggaagauggcauuucu

SEQ ID NO: 704 - RNA, 20 nt, Artificial Sequence
  Description of Artificial Sequence: Synthetic oligonucleotide
ucaaggaagauggcauuucu

SEQ ID NO: 705 - RNA, 20 nt, Artificial Sequence
  Description of Artificial Sequence: Synthetic oligonucleotide
ucaaggaagauggcauuucu

SEQ ID NO: 706 - RNA, 20 nt, Artificial Sequence
  Description of Artificial Sequence: Synthetic oligonucleotide
ucaaggaagauggcauuucu

SEQ ID NO: 707 - RNA, 20 nt, Artificial Sequence
  Description of Artificial Sequence: Synthetic oligonucleotide
ucaaggaagauggcauuucu

SEQ ID NO: 708 - RNA, 20 nt, Artificial Sequence
  Description of Artificial Sequence: Synthetic oligonucleotide
ucaaggaagauggcauuucu

SEQ ID NO: 709 - RNA, 20 nt, Artificial Sequence
  Description of Artificial Sequence: Synthetic oligonucleotide
ucaaggaagauggcauuucu

SEQ ID NO: 710 - RNA, 20 nt, Artificial Sequence
  Description of Artificial Sequence: Synthetic oligonucleotide
ucaaggaagauggcauuucu

SEQ ID NO: 711 - RNA, 20 nt, Artificial Sequence
  Description of Artificial Sequence: Synthetic oligonucleotide
ucaaggaagauggcauuucu

SEQ ID NO: 712 - RNA, 20 nt, Artificial Sequence
  Description of Artificial Sequence: Synthetic oligonucleotide
ucaaggaagauggcauuucu

SEQ ID NO: 713 - RNA, 20 nt, Artificial Sequence
  Description of Artificial Sequence: Synthetic oligonucleotide
ucaaggaagauggcauuucu

SEQ ID NO: 714 - RNA, 20 nt, Artificial Sequence
  Description of Artificial Sequence: Synthetic oligonucleotide
ucaaggaagauggcauuucu

SEQ ID NO: 715 - RNA, 20 nt, Artificial Sequence
  Description of Artificial Sequence: Synthetic oligonucleotide
ucaaggaagauggcauuucu

SEQ ID NO: 716 - RNA, 20 nt, Artificial Sequence
  Description of Artificial Sequence: Synthetic oligonucleotide
ucaaggaagauggcauuucu

SEQ ID NO: 717 - RNA, 20 nt, Artificial Sequence
  Description of Artificial Sequence: Synthetic oligonucleotide
ucaaggaagauggcauuucu

SEQ ID NO: 718 - RNA, 20 nt, Artificial Sequence
  Description of Artificial Sequence: Synthetic oligonucleotide
ucaaggaagauggcauuucu

SEQ ID NO: 719 - RNA, 20 nt, Artificial Sequence
  Description of Artificial Sequence: Synthetic oligonucleotide
ucaaggaagauggcauuucu

SEQ ID NO: 720 - RNA, 20 nt, Artificial Sequence
  Description of Artificial Sequence: Synthetic oligonucleotide
ucaaggaagauggcauuucu

SEQ ID NO: 721 - RNA, 20 nt, Artificial Sequence
  Description of Artificial Sequence: Synthetic oligonucleotide
ucaaggaagauggcauuucu

SEQ ID NO: 722 - RNA, 20 nt, Artificial Sequence
  Description of Artificial Sequence: Synthetic oligonucleotide
ucaaggaagauggcauuucu

SEQ ID NO: 723 - RNA, 20 nt, Artificial Sequence
  Description of Artificial Sequence: Synthetic oligonucleotide
ucaaggaagauggcauuucu

SEQ ID NO: 724 - RNA, 20 nt, Artificial Sequence
  Description of Artificial Sequence: Synthetic oligonucleotide
ucaaggaagauggcauuucu

SEQ ID NO: 725 - RNA, 20 nt, Artificial Sequence
  Description of Artificial Sequence: Synthetic oligonucleotide
ucaaggaagauggcauuucu

SEQ ID NO: 726 - RNA, 20 nt, Artificial Sequence
  Description of Artificial Sequence: Synthetic oligonucleotide
ucaaggaagauggcauuucu

SEQ ID NO: 727 - RNA, 20 nt, Artificial Sequence
  Description of Artificial Sequence: Synthetic oligonucleotide
ucaaggaagauggcauuucu

SEQ ID NO: 728 - RNA, 20 nt, Artificial Sequence
  Description of Artificial Sequence: Synthetic oligonucleotide
ucaaggaagauggcauuucu

SEQ ID NO: 729 - RNA, 20 nt, Artificial Sequence
  Description of Artificial Sequence: Synthetic oligonucleotide
ucaaggaagauggcauuucu

SEQ ID NO: 730 - RNA, 20 nt, Artificial Sequence
  Description of Artificial Sequence: Synthetic oligonucleotide
ucaaggaagauggcauuucu

SEQ ID NO: 731 - RNA, 20 nt, Artificial Sequence
  Description of Artificial Sequence: Synthetic oligonucleotide
ucaaggaagauggcauuucu

SEQ ID NO: 732 - RNA, 20 nt, Artificial Sequence
  Description of Artificial Sequence: Synthetic oligonucleotide
ucaaggaagauggcauuucu

SEQ ID NO: 733 - RNA, 20 nt, Artificial Sequence
  Description of Artificial Sequence: Synthetic oligonucleotide
ucaaggaagauggcauuucu

SEQ ID NO: 734 - RNA, 20 nt, Artificial Sequence
  Description of Artificial Sequence: Synthetic oligonucleotide
ucaaggaagauggcauuucu

SEQ ID NO: 735 - RNA, 20 nt, Artificial Sequence
  Description of Artificial Sequence: Synthetic oligonucleotide
ucaaggaagauggcauuucu

SEQ ID NO: 736 - RNA, 20 nt, Artificial Sequence
  Description of Artificial Sequence: Synthetic oligonucleotide
ucaaggaagauggcauuucu

SEQ ID NO: 737 - RNA, 20 nt, Artificial Sequence
  Description of Artificial Sequence: Synthetic oligonucleotide
ucaaggaagauggcauuucu

SEQ ID NO: 738 - RNA, 20 nt, Artificial Sequence
  Description of Artificial Sequence: Synthetic oligonucleotide
ucaaggaagauggcauuucu

SEQ ID NO: 739 - RNA, 30 nt, Artificial Sequence
  Description of Artificial Sequence: Synthetic oligonucleotide
gccaacugggagcuggagcgcaccaaccag

SEQ ID NO: 740 - RNA, 20 nt, Artificial Sequence
  Description of Artificial Sequence: Synthetic oligonucleotide
ucaaggaagauggcauuucu

SEQ ID NO: 741 - RNA, 20 nt, Artificial Sequence
  Description of Artificial Sequence: Synthetic oligonucleotide
ucaaggaagauggcauuucu

SEQ ID NO: 742 - RNA, 20 nt, Artificial Sequence
  Description of Artificial Sequence: Synthetic oligonucleotide
ucaaggaagauggcauuucu

SEQ ID NO: 743 - RNA, 20 nt, Artificial Sequence
  Description of Artificial Sequence: Synthetic oligonucleotide
ucaaggaagauggcauuucu

SEQ ID NO: 744 - RNA, 20 nt, Artificial Sequence
  Description of Artificial Sequence: Synthetic oligonucleotide
ccuucccugaagguuccucc

SEQ ID NO: 745 - RNA, 20 nt, Artificial Sequence
  Description of Artificial Sequence: Synthetic oligonucleotide
ccuucccugaagguuccucc

SEQ ID NO: 746 - RNA, 20 nt, Artificial Sequence
  Description of Artificial Sequence: Synthetic oligonucleotide
ccuucccugaagguuccucc

SEQ ID NO: 747 - RNA, 20 nt, Artificial Sequence
  Description of Artificial Sequence: Synthetic oligonucleotide
ccuucccugaagguuccucc

SEQ ID NO: 748 - RNA, 20 nt, Artificial Sequence
  Description of Artificial Sequence: Synthetic oligonucleotide
ccuucccugaagguuccucc

SEQ ID NO: 749 - RNA, 20 nt, Artificial Sequence
  Description of Artificial Sequence: Synthetic oligonucleotide
ccuucccugaagguuccucc

SEQ ID NO: 750 - RNA, 20 nt, Artificial Sequence
  Description of Artificial Sequence: Synthetic oligonucleotide
ucaaggaagauggcauuucu

SEQ ID NO: 751 - RNA, 20 nt, Artificial Sequence
  Description of Artificial Sequence: Synthetic oligonucleotide
ucaaggaagauggcauuucu

SEQ ID NO: 752 - RNA, 20 nt, Artificial Sequence
  Description of Artificial Sequence: Synthetic oligonucleotide
ucaaggaagauggcauuucu

SEQ ID NO: 753 - RNA, 19 nt, Artificial Sequence
  Description of Artificial Sequence: Synthetic oligonucleotide
ucaaggaagauggcauuuc

SEQ ID NO: 754 - RNA, 18 nt, Artificial Sequence
  Description of Artificial Sequence: Synthetic oligonucleotide
ucaaggaagauggcauuu

SEQ ID NO: 755 - RNA, 19 nt, Artificial Sequence
  Description of Artificial Sequence: Synthetic oligonucleotide
caaggaagauggcauuucu

SEQ ID NO: 756 - RNA, 20 nt, Artificial Sequence
  Description of Artificial Sequence: Synthetic oligonucleotide
ggccaaaccucggcuuaccu

SEQ ID NO: 757 - RNA, 20 nt, Artificial Sequence
  Description of Artificial Sequence: Synthetic oligonucleotide
ggccaaaccucggcuuaccu

SEQ ID NO: 758 - RNA, 20 nt, Artificial Sequence
  Description of Artificial Sequence: Synthetic oligonucleotide
uucuguaagguuuuuaugug

SEQ ID NO: 759 - RNA, 20 nt, Artificial Sequence
  Description of Artificial Sequence: Synthetic oligonucleotide
auuucuguaagguuuuuaug

SEQ ID NO: 760 - RNA, 20 nt, Artificial Sequence
  Description of Artificial Sequence: Synthetic oligonucleotide
ccauuucuguaagguuuuua

SEQ ID NO: 761 - RNA, 20 nt, Artificial Sequence
  Description of Artificial Sequence: Synthetic oligonucleotide
auccauuucuguaagguuuu

SEQ ID NO: 762 - RNA, 20 nt, Artificial Sequence
  Description of Artificial Sequence: Synthetic oligonucleotide
cauccauuucuguaagguuu

SEQ ID NO: 763 - RNA, 20 nt, Artificial Sequence
  Description of Artificial Sequence: Synthetic oligonucleotide
ccauccauuucuguaagguu

SEQ ID NO: 764 - RNA, 20 nt, Artificial Sequence
  Description of Artificial Sequence: Synthetic oligonucleotide
gccauccauuucuguaaggu

SEQ ID NO: 765 - RNA, 20 nt, Artificial Sequence
  Description of Artificial Sequence: Synthetic oligonucleotide
agccauccauuucuguaagg

SEQ ID NO: 766 - RNA, 20 nt, Artificial Sequence
  Description of Artificial Sequence: Synthetic oligonucleotide
cagccauccauuucuguaag

SEQ ID NO: 767 - RNA, 20 nt, Artificial Sequence
  Description of Artificial Sequence: Synthetic oligonucleotide
ucagccauccauuucuguaa

SEQ ID NO: 768 - RNA, 20 nt, Artificial Sequence
  Description of Artificial Sequence: Synthetic oligonucleotide
uucagccauccauuucugua

SEQ ID NO: 769 - RNA, 20 nt, Artificial Sequence
  Description of Artificial Sequence: Synthetic oligonucleotide
cuucagccauccauuucugu

SEQ ID NO: 770 - RNA, 20 nt, Artificial Sequence
  Description of Artificial Sequence: Synthetic oligonucleotide
acuucagccauccauuucug

SEQ ID NO: 771 - RNA, 20 nt, Artificial Sequence
  Description of Artificial Sequence: Synthetic oligonucleotide
aacuucagccauccauuucu

SEQ ID NO: 772 - RNA, 20 nt, Artificial Sequence
  Description of Artificial Sequence: Synthetic oligonucleotide
caacuucagccauccauuuc

SEQ ID NO: 773 - RNA, 20 nt, Artificial Sequence
  Description of Artificial Sequence: Synthetic oligonucleotide
ucaacuucagccauccauuu

SEQ ID NO: 774 - RNA, 20 nt, Artificial Sequence
  Description of Artificial Sequence: Synthetic oligonucleotide
aucaacuucagccauccauu

SEQ ID NO: 775 - RNA, 20 nt, Artificial Sequence
  Description of Artificial Sequence: Synthetic oligonucleotide
caucaacuucagccauccau

SEQ ID NO: 776 - RNA, 20 nt, Artificial Sequence
  Description of Artificial Sequence: Synthetic oligonucleotide
acaucaacuucagccaucca

SEQ ID NO: 777 - RNA, 20 nt, Artificial Sequence
  Description of Artificial Sequence: Synthetic oligonucleotide
aacaucaacuucagccaucc

SEQ ID NO: 778 - RNA, 20 nt, Artificial Sequence
  Description of Artificial Sequence: Synthetic oligonucleotide
gaaaacaucaacuucagcca

SEQ ID NO: 779 - RNA, 20 nt, Artificial Sequence
  Description of Artificial Sequence: Synthetic oligonucleotide
caggaaaacaucaacuucag

SEQ ID NO: 780 - RNA, 20 nt, Artificial Sequence
  Description of Artificial Sequence: Synthetic oligonucleotide
uuucaggaaaacaucaacuu

SEQ ID NO: 781 - RNA, 20 nt, Artificial Sequence
  Description of Artificial Sequence: Synthetic oligonucleotide
cucuuucaggaaaacaucaa

SEQ ID NO: 782 - RNA, 20 nt, Artificial Sequence
  Description of Artificial Sequence: Synthetic oligonucleotide
uuccucuuucaggaaaacau

SEQ ID NO: 783 - RNA, 20 nt, Artificial Sequence
  Description of Artificial Sequence: Synthetic oligonucleotide
gccauuccucuuucaggaaa

SEQ ID NO: 784 - RNA, 20 nt, Artificial Sequence
  Description of Artificial Sequence: Synthetic oligonucleotide
ggccauuccucuuucaggaa

SEQ ID NO: 785 - RNA, 20 nt, Artificial Sequence
  Description of Artificial Sequence: Synthetic oligonucleotide
aggccauuccucuuucagga

SEQ ID NO: 786 - RNA, 20 nt, Artificial Sequence
  Description of Artificial Sequence: Synthetic oligonucleotide
caggccauuccucuuucagg

SEQ ID NO: 787 - RNA, 20 nt, Artificial Sequence
  Description of Artificial Sequence: Synthetic oligonucleotide
gcaggccauuccucuuucag

SEQ ID NO: 788 - RNA, 20 nt, Artificial Sequence
  Description of Artificial Sequence: Synthetic oligonucleotide
ggcaggccauuccucuuuca

SEQ ID NO: 789 - RNA, 20 nt, Artificial Sequence
  Description of Artificial Sequence: Synthetic oligonucleotide
gggcaggccauuccucuuuc

SEQ ID NO: 790 - RNA, 20 nt, Artificial Sequence
  Description of Artificial Sequence: Synthetic oligonucleotide
agggcaggccauuccucuuu

SEQ ID NO: 791 - RNA, 20 nt, Artificial Sequence
  Description of Artificial Sequence: Synthetic oligonucleotide
cagggcaggccauuccucuu

SEQ ID NO: 792 - RNA, 20 nt, Artificial Sequence
  Description of Artificial Sequence: Synthetic oligonucleotide
ccagggcaggccauuccucu

SEQ ID NO: 793 - RNA, 20 nt, Artificial Sequence
  Description of Artificial Sequence: Synthetic oligonucleotide
cccagggcaggccauuccuc

SEQ ID NO: 794 - RNA, 20 nt, Artificial Sequence
  Description of Artificial Sequence: Synthetic oligonucleotide
ccccagggcaggccauuccu

SEQ ID NO: 795 - RNA, 20 nt, Artificial Sequence
  Description of Artificial Sequence: Synthetic oligonucleotide
cccccagggcaggccauucc

SEQ ID NO: 796 - RNA, 20 nt, Artificial Sequence
  Description of Artificial Sequence: Synthetic oligonucleotide
ucccccagggcaggccauuc

SEQ ID NO: 797 - RNA, 20 nt, Artificial Sequence
  Description of Artificial Sequence: Synthetic oligonucleotide
aucccccagggcaggccauu

SEQ ID NO: 798 - RNA, 20 nt, Artificial Sequence
  Description of Artificial Sequence: Synthetic oligonucleotide
caucccccagggcaggccau

SEQ ID NO: 799 - RNA, 20 nt, Artificial Sequence
  Description of Artificial Sequence: Synthetic oligonucleotide
gcaucccccagggcaggcca

SEQ ID NO: 800 - RNA, 20 nt, Artificial Sequence
  Description of Artificial Sequence: Synthetic oligonucleotide
agcaucccccagggcaggcc

SEQ ID NO: 801 - RNA, 20 nt, Artificial Sequence
  Description of Artificial Sequence: Synthetic oligonucleotide
cagcaucccccagggcaggc

SEQ ID NO: 802 - RNA, 20 nt, Artificial Sequence
  Description of Artificial Sequence: Synthetic oligonucleotide
ucagcaucccccagggcagg

SEQ ID NO: 803 - RNA, 20 nt, Artificial Sequence
  Description of Artificial Sequence: Synthetic oligonucleotide
uucagcaucccccagggcag

SEQ ID NO: 804 - RNA, 20 nt, Artificial Sequence
  Description of Artificial Sequence: Synthetic oligonucleotide
uuucagcaucccccagggca

SEQ ID NO: 805 - RNA, 20 nt, Artificial Sequence
  Description of Artificial Sequence: Synthetic oligonucleotide
auuucagcaucccccagggc

SEQ ID NO: 806 - RNA, 20 nt, Artificial Sequence
  Description of Artificial Sequence: Synthetic oligonucleotide
gauuucagcaucccccaggg

SEQ ID NO: 807 - RNA, 20 nt, Artificial Sequence
  Description of Artificial Sequence: Synthetic oligonucleotide
ggauuucagcaucccccagg

SEQ ID NO: 808 - RNA, 20 nt, Artificial Sequence
  Description of Artificial Sequence: Synthetic oligonucleotide
aggauuucagcaucccccag

SEQ ID NO: 809 - RNA, 20 nt, Artificial Sequence
  Description of Artificial Sequence: Synthetic oligonucleotide
caggauuucagcauccccca

SEQ ID NO: 810 - RNA, 20 nt, Artificial Sequence
  Description of Artificial Sequence: Synthetic oligonucleotide
ucaggauuucagcauccccc

SEQ ID NO: 811 - RNA, 20 nt, Artificial Sequence
  Description of Artificial Sequence: Synthetic oligonucleotide
uucaggauuucagcaucccc

SEQ ID NO: 812 - RNA, 20 nt, Artificial Sequence
  Description of Artificial Sequence: Synthetic oligonucleotide
uuucaggauuucagcauccc

SEQ ID NO: 813 - RNA, 20 nt, Artificial Sequence
  Description of Artificial Sequence: Synthetic oligonucleotide
uuuucaggauuucagcaucc

SEQ ID NO: 814 - RNA, 20 nt, Artificial Sequence
  Description of Artificial Sequence: Synthetic oligonucleotide
uuuuucaggauuucagcauc

SEQ ID NO: 815 - RNA, 20 nt, Artificial Sequence
  Description of Artificial Sequence: Synthetic oligonucleotide
uuuuuucaggauuucagcau

SEQ ID NO: 816 - RNA, 20 nt, Artificial Sequence
  Description of Artificial Sequence: Synthetic oligonucleotide
guuuuuucaggauuucagca

SEQ ID NO: 817 - RNA, 20 nt, Artificial Sequence
  Description of Artificial Sequence: Synthetic oligonucleotide
uguuuuuucaggauuucagc

SEQ ID NO: 818 - RNA, 20 nt, Artificial Sequence
  Description of Artificial Sequence: Synthetic oligonucleotide
cuguuuuuucaggauuucag

SEQ ID NO: 819 - RNA, 20 nt, Artificial Sequence
  Description of Artificial Sequence: Synthetic oligonucleotide
gcuguuuuuucaggauuuca

SEQ ID NO: 820 - RNA, 20 nt, Artificial Sequence
  Description of Artificial Sequence: Synthetic oligonucleotide
agcuguuuuuucaggauuuc

SEQ ID NO: 821 - RNA, 20 nt, Artificial Sequence
  Description of Artificial Sequence: Synthetic oligonucleotide
gagcuguuuuuucaggauuu

SEQ ID NO: 822 - RNA, 20 nt, Artificial Sequence
  Description of Artificial Sequence: Synthetic oligonucleotide
ugagcuguuuuuucaggauu

SEQ ID NO: 823 - RNA, 20 nt, Artificial Sequence
  Description of Artificial Sequence: Synthetic oligonucleotide
uugagcuguuuuuucaggau

SEQ ID NO: 824 - RNA, 20 nt, Artificial Sequence
  Description of Artificial Sequence: Synthetic oligonucleotide
uuugagcuguuuuuucagga

SEQ ID NO: 825 - RNA, 20 nt, Artificial Sequence
  Description of Artificial Sequence: Synthetic oligonucleotide
guuugagcuguuuuuucagg

SEQ ID NO: 826 - RNA, 20 nt, Artificial Sequence
  Description of Artificial Sequence: Synthetic oligonucleotide
uuguuugagcuguuuuuuca

SEQ ID NO: 827 - RNA, 20 nt, Artificial Sequence
  Description of Artificial Sequence: Synthetic oligonucleotide
cauuguuugagcuguuuuuu

SEQ ID NO: 828 - RNA, 20 nt, Artificial Sequence
  Description of Artificial Sequence: Synthetic oligonucleotide
gcauuguuugagcuguuuuu

SEQ ID NO: 829 - RNA, 20 nt, Artificial Sequence
  Description of Artificial Sequence: Synthetic oligonucleotide
ugcauuguuugagcuguuuu

SEQ ID NO: 830 - RNA, 20 nt, Artificial Sequence
  Description of Artificial Sequence: Synthetic oligonucleotide
cugcauuguuugagcuguuu

SEQ ID NO: 831 - RNA, 20 nt, Artificial Sequence
  Description of Artificial Sequence: Synthetic oligonucleotide
ucugcauuguuugagcuguu

SEQ ID NO: 832 - RNA, 20 nt, Artificial Sequence
  Description of Artificial Sequence: Synthetic oligonucleotide
cucugcauuguuugagcugu

SEQ ID NO: 833 - RNA, 20 nt, Artificial Sequence
  Description of Artificial Sequence: Synthetic oligonucleotide
acucugcauuguuugagcug

SEQ ID NO: 834 - RNA, 20 nt, Artificial Sequence
  Description of Artificial Sequence: Synthetic oligonucleotide
uacucugcauuguuugagcu

SEQ ID NO: 835 - RNA, 20 nt, Artificial Sequence
  Description of Artificial Sequence: Synthetic oligonucleotide
uuacucugcauuguuugagc

SEQ ID NO: 836 - RNA, 20 nt, Artificial Sequence
  Description of Artificial Sequence: Synthetic oligonucleotide
cuuacucugcauuguuugag

SEQ ID NO: 837 - RNA, 20 nt, Artificial Sequence
  Description of Artificial Sequence: Synthetic oligonucleotide
ucuuacucugcauuguuuga

SEQ ID NO: 838 - RNA, 20 nt, Artificial Sequence
  Description of Artificial Sequence: Synthetic oligonucleotide
aucuuacucugcauuguuug

SEQ ID NO: 839 - RNA, 20 nt, Artificial Sequence
  Description of Artificial Sequence: Synthetic oligonucleotide
aaucuuacucugcauuguuu

SEQ ID NO: 840 - RNA, 20 nt, Artificial Sequence
  Description of Artificial Sequence: Synthetic oligonucleotide
caaaucuuacucugcauugu

SEQ ID NO: 841 - RNA, 20 nt, Artificial Sequence
  Description of Artificial Sequence: Synthetic oligonucleotide
gauacaaaucuuacucugca

SEQ ID NO: 842 - DNA, 20 bp, Artificial Sequence
  Description of Artificial Sequence: Synthetic oligonucleotide
  Description of Combined DNA/RNA Molecule: Synthetic oligonucleotide
gggucagctgccaatgcuag

SEQ ID NO: 843 - DNA, 20 bp, Artificial Sequence
  Description of Artificial Sequence: Synthetic oligonucleotide
  Description of Combined DNA/RNA Molecule: Synthetic oligonucleotide
gggucagctgccaatgcuag

SEQ ID NO: 844 - DNA, 20 bp, Artificial Sequence
  Description of Artificial Sequence: Synthetic oligonucleotide
  Description of Combined DNA/RNA Molecule: Synthetic oligonucleotide
gggucagctgccaatgcuag

SEQ ID NO: 845 - DNA, 20 bp, Artificial Sequence
  Description of Artificial Sequence: Synthetic oligonucleotide
  Description of Combined DNA/RNA Molecule: Synthetic oligonucleotide
gggucagctgccaatgcuag

SEQ ID NO: 846 - DNA, 20 bp, Artificial Sequence
  Description of Artificial Sequence: Synthetic oligonucleotide
  Description of Combined DNA/RNA Molecule: Synthetic oligonucleotide
gggucagctgccaatgctag

SEQ ID NO: 847 - DNA, 20 bp, Artificial Sequence
  Description of Artificial Sequence: Synthetic oligonucleotide
  Description of Combined DNA/RNA Molecule: Synthetic oligonucleotide
gggucagctgccaatgctag

SEQ ID NO: 848 - DNA, 20 bp, Artificial Sequence
  Description of Artificial Sequence: Synthetic oligonucleotide
  Description of Combined DNA/RNA Molecule: Synthetic oligonucleotide
gggtcagctgccaatgcuag

SEQ ID NO: 849 - DNA, 20 bp, Artificial Sequence
  Description of Artificial Sequence: Synthetic oligonucleotide
  Description of Combined DNA/RNA Molecule: Synthetic oligonucleotide
gggtcagctgccaatgcuag

SEQ ID NO: 850 - DNA, 20 bp, Artificial Sequence
  Description of Artificial Sequence: Synthetic oligonucleotide
  Description of Combined DNA/RNA Molecule: Synthetic oligonucleotide
gggucagctgccaatgcuag

SEQ ID NO: 851 - DNA, 20 bp, Artificial Sequence
  Description of Artificial Sequence: Synthetic oligonucleotide
  Description of Combined DNA/RNA Molecule: Synthetic oligonucleotide
gggucagctgccaatgcuag

SEQ ID NO: 852 - DNA, 20 bp, Artificial Sequence
  Description of Artificial Sequence: Synthetic oligonucleotide
gggtcagctgccaatgctag

SEQ ID NO: 853 - DNA, 20 bp, Artificial Sequence
  Description of Artificial Sequence: Synthetic oligonucleotide
gggtcagctgccaatgctag

SEQ ID NO: 854 - DNA, 20 bp, Artificial Sequence
  Description of Artificial Sequence: Synthetic oligonucleotide
  Description of Combined DNA/RNA Molecule: Synthetic oligonucleotide
gggucagctgccaatgcuag

SEQ ID NO: 855 - DNA, 20 bp, Artificial Sequence
  Description of Artificial Sequence: Synthetic oligonucleotide
  Description of Combined DNA/RNA Molecule: Synthetic oligonucleotide
gggucagctgccaatgcuag

SEQ ID NO: 856 - DNA, 20 bp, Artificial Sequence
  Description of Artificial Sequence: Synthetic oligonucleotide
  Description of Combined DNA/RNA Molecule: Synthetic oligonucleotide
gggucagctgccaatgcuag

SEQ ID NO: 857 - DNA, 20 bp, Artificial Sequence
  Description of Artificial Sequence: Synthetic oligonucleotide
  Description of Combined DNA/RNA Molecule: Synthetic oligonucleotide
gggucagctgccaatgcuag

SEQ ID NO: 858 - DNA, 20 bp, Artificial Sequence
  Description of Artificial Sequence: Synthetic oligonucleotide
  Description of Combined DNA/RNA Molecule: Synthetic oligonucleotide
gggucagctgccaatgcuag

SEQ ID NO: 859 - DNA, 20 bp, Artificial Sequence
  Description of Artificial Sequence: Synthetic oligonucleotide
  Description of Combined DNA/RNA Molecule: Synthetic oligonucleotide
gggucagctgccaatgcuag

SEQ ID NO: 860 - DNA, 20 bp, Artificial Sequence
  Description of Artificial Sequence: Synthetic oligonucleotide
  Description of Combined DNA/RNA Molecule: Synthetic oligonucleotide
gggucagctgccaatgcuag

SEQ ID NO: 861 - DNA, 20 bp, Artificial Sequence
  Description of Artificial Sequence: Synthetic oligonucleotide
  Description of Combined DNA/RNA Molecule: Synthetic oligonucleotide
gggucagctgccaatgcuag

SEQ ID NO: 862 - DNA, 20 bp, Artificial Sequence
  Description of Artificial Sequence: Synthetic oligonucleotide
  Description of Combined DNA/RNA Molecule: Synthetic oligonucleotide
gggucagctgccaatgcuag

SEQ ID NO: 863 - DNA, 20 bp, Artificial Sequence
  Description of Artificial Sequence: Synthetic oligonucleotide
  Description of Combined DNA/RNA Molecule: Synthetic oligonucleotide
gggucagctgccaatgcuag

SEQ ID NO: 864 - DNA, 20 bp, Artificial Sequence
  Description of Artificial Sequence: Synthetic oligonucleotide
  Description of Combined DNA/RNA Molecule: Synthetic oligonucleotide
gggucagctgccaatgcuag

SEQ ID NO: 865 - DNA, 20 bp, Artificial Sequence
  Description of Artificial Sequence: Synthetic oligonucleotide
  Description of Combined DNA/RNA Molecule: Synthetic oligonucleotide
gggucagctgccaatgcuag

SEQ ID NO: 866 - DNA, 20 bp, Artificial Sequence
  Description of Artificial Sequence: Synthetic oligonucleotide
  Description of Combined DNA/RNA Molecule: Synthetic oligonucleotide
gggucagctgccaatgcuag

SEQ ID NO: 867 - DNA, 20 bp, Artificial Sequence
  Description of Artificial Sequence: Synthetic oligonucleotide
  Description of Combined DNA/RNA Molecule: Synthetic oligonucleotide
gggucagctgccaatgcuag

SEQ ID NO: 868 - DNA, 20 bp, Artificial Sequence
  Description of Artificial Sequence: Synthetic oligonucleotide
  Description of Combined DNA/RNA Molecule: Synthetic oligonucleotide
gggucagctgccaatgcuag

SEQ ID NO: 869 - DNA, 20 bp, Artificial Sequence
  Description of Artificial Sequence: Synthetic oligonucleotide
  Description of Combined DNA/RNA Molecule: Synthetic oligonucleotide
gggucagctgccaatgcuag

SEQ ID NO: 870 - DNA, 20 bp, Artificial Sequence
  Description of Artificial Sequence: Synthetic oligonucleotide
  Description of Combined DNA/RNA Molecule: Synthetic oligonucleotide
gggucagctgccaatgcuag

SEQ ID NO: 871 - DNA, 20 bp, Artificial Sequence
  Description of Artificial Sequence: Synthetic oligonucleotide
  Description of Combined DNA/RNA Molecule: Synthetic oligonucleotide
gggucagctgccaatgcuag

SEQ ID NO: 872 - DNA, 20 bp, Artificial Sequence
  Description of Artificial Sequence: Synthetic oligonucleotide
  Description of Combined DNA/RNA Molecule: Synthetic oligonucleotide
gggucagctgccaatgcuag

SEQ ID NO: 873 - DNA, 20 bp, Artificial Sequence
  Description of Artificial Sequence: Synthetic oligonucleotide
  Description of Combined DNA/RNA Molecule: Synthetic oligonucleotide
gggucagctgccaatgcuag

SEQ ID NO: 874 - DNA, 20 bp, Artificial Sequence
  Description of Artificial Sequence: Synthetic oligonucleotide
  Description of Combined DNA/RNA Molecule: Synthetic oligonucleotide
gggucagctgccaatgcuag

SEQ ID NO: 875 - DNA, 20 bp, Artificial Sequence
  Description of Artificial Sequence: Synthetic oligonucleotide
  Description of Combined DNA/RNA Molecule: Synthetic oligonucleotide
gggucagctgccaatgcuag

SEQ ID NO: 876 - DNA, 20 bp, Artificial Sequence
  Description of Artificial Sequence: Synthetic oligonucleotide
  Description of Combined DNA/RNA Molecule: Synthetic oligonucleotide
gggucagctgccaatgcuag

SEQ ID NO: 877 - DNA, 20 bp, Artificial Sequence
  Description of Artificial Sequence: Synthetic oligonucleotide
  Description of Combined DNA/RNA Molecule: Synthetic oligonucleotide
gggucagctgccaatgcuag

SEQ ID NO: 878 - DNA, 20 bp, Artificial Sequence
  Description of Artificial Sequence: Synthetic oligonucleotide
  Description of Combined DNA/RNA Molecule: Synthetic oligonucleotide
gggucagctgccaatgcuag

SEQ ID NO: 879 - DNA, 20 bp, Artificial Sequence
  Description of Artificial Sequence: Synthetic oligonucleotide
  Description of Combined DNA/RNA Molecule: Synthetic oligonucleotide
gggucagctgccaatgcuag

SEQ ID NO: 880 - DNA, 20 bp, Artificial Sequence
  Description of Artificial Sequence: Synthetic oligonucleotide
  Description of Combined DNA/RNA Molecule: Synthetic oligonucleotide
gggucagctgccaatgcuag

SEQ ID NO: 881 - DNA, 20 bp, Artificial Sequence
  Description of Artificial Sequence: Synthetic oligonucleotide
  Description of Combined DNA/RNA Molecule: Synthetic oligonucleotide
gggucagctgccaatgcuag

SEQ ID NO: 882 - RNA, 20 nt, Artificial Sequence
  Description of Artificial Sequence: Synthetic oligonucleotide
cuagcauuggcagcugaccc

SEQ ID NO: 883 - DNA, 20 bp, Artificial Sequence
  Description of Artificial Sequence: Synthetic oligonucleotide
gggtcagctgccaatgctag

SEQ ID NO: 884 - DNA, 20 bp, Artificial Sequence
  Description of Artificial Sequence: Synthetic oligonucleotide
  Description of Combined DNA/RNA Molecule: Synthetic oligonucleotide
gggucagctgccaatgcuag

SEQ ID NO: 885 - DNA, 20 bp, Artificial Sequence
  Description of Artificial Sequence: Synthetic oligonucleotide
  Description of Combined DNA/RNA Molecule: Synthetic oligonucleotide
gggucagctgccaatgcuag

SEQ ID NO: 886 - DNA, 20 bp, Artificial Sequence
  Description of Artificial Sequence: Synthetic oligonucleotide
gggtcagctgccaatgctag

SEQ ID NO: 887 - DNA, 20 bp, Artificial Sequence
  Description of Artificial Sequence: Synthetic oligonucleotide
gggtcagctgccaatgctag

SEQ ID NO: 888 - DNA, 20 bp, Artificial Sequence
  Description of Artificial Sequence: Synthetic oligonucleotide
gggtcagctgccaatgctag

SEQ ID NO: 889 - DNA, 20 bp, Artificial Sequence
  Description of Artificial Sequence: Synthetic oligonucleotide
gggtcagctgccaatgctag

SEQ ID NO: 890 - DNA, 20 bp, Artificial Sequence
  Description of Artificial Sequence: Synthetic oligonucleotide
gggtcagctgccaatgctag

SEQ ID NO: 891 - DNA, 20 bp, Artificial Sequence
  Description of Artificial Sequence: Synthetic oligonucleotide
gggtcagctgccaatgctag

SEQ ID NO: 892 - DNA, 20 bp, Artificial Sequence
  Description of Artificial Sequence: Synthetic oligonucleotide
gggtcagctgccaatgctag

SEQ ID NO: 893 - DNA, 20 bp, Artificial Sequence
  Description of Artificial Sequence: Synthetic oligonucleotide
gggtcagctgccaatgctag

SEQ ID NO: 894 - DNA, 20 bp, Artificial Sequence
  Description of Artificial Sequence: Synthetic oligonucleotide
gggtcagctgccaatgctag

SEQ ID NO: 895 - DNA, 20 bp, Artificial Sequence
  Description of Artificial Sequence: Synthetic oligonucleotide
gggtcagctgccaatgctag

SEQ ID NO: 896 - DNA, 20 bp, Artificial Sequence
  Description of Artificial Sequence: Synthetic oligonucleotide
gggtcagctgccaatgctag

SEQ ID NO: 897 - DNA, 20 bp, Artificial Sequence
  Description of Artificial Sequence: Synthetic oligonucleotide
gggtcagctgccaatgctag

SEQ ID NO: 898 - DNA, 20 bp, Artificial Sequence
  Description of Artificial Sequence: Synthetic oligonucleotide
gggtcagctgccaatgctag

SEQ ID NO: 899 - DNA, 20 bp, Artificial Sequence
  Description of Artificial Sequence: Synthetic oligonucleotide
gggtcagctgccaatgctag

SEQ ID NO: 900 - DNA, 20 bp, Artificial Sequence
  Description of Artificial Sequence: Synthetic oligonucleotide
gggtcagctgccaatgctag

SEQ ID NO: 901 - DNA, 20 bp, Artificial Sequence
  Description of Artificial Sequence: Synthetic oligonucleotide
gggtcagctgccaatgctag

SEQ ID NO: 902 - DNA, 20 bp, Artificial Sequence
  Description of Artificial Sequence: Synthetic oligonucleotide
gggtcagctgccaatgctag

SEQ ID NO: 903 - DNA, 20 bp, Artificial Sequence
  Description of Artificial Sequence: Synthetic oligonucleotide
gggtcagctgccaatgctag

SEQ ID NO: 904 - DNA, 20 bp, Artificial Sequence
  Description of Artificial Sequence: Synthetic oligonucleotide
gggtcagctgccaatgctag

SEQ ID NO: 905 - DNA, 20 bp, Artificial Sequence
  Description of Artificial Sequence: Synthetic oligonucleotide
gggtcagctgccaatgctag

SEQ ID NO: 906 - DNA, 20 bp, Artificial Sequence
  Description of Artificial Sequence: Synthetic oligonucleotide
gggtcagctgccaatgctag

SEQ ID NO: 907 - DNA, 20 bp, Artificial Sequence
  Description of Artificial Sequence: Synthetic oligonucleotide
gggtcagctgccaatgctag

SEQ ID NO: 908 - DNA, 20 bp, Artificial Sequence
  Description of Artificial Sequence: Synthetic oligonucleotide
  Description of Combined DNA/RNA Molecule: Synthetic oligonucleotide
uagcgcccacctcaccccuc

SEQ ID NO: 909 - DNA, 20 bp, Artificial Sequence
  Description of Artificial Sequence: Synthetic oligonucleotide
  Description of Combined DNA/RNA Molecule: Synthetic oligonucleotide
uuagcgcccacctcaccccu

SEQ ID NO: 910 - DNA, 20 bp, Artificial Sequence
  Description of Artificial Sequence: Synthetic oligonucleotide
  Description of Combined DNA/RNA Molecule: Synthetic oligonucleotide
cuuagcgcccacctcacccc

SEQ ID NO: 911 - DNA, 20 bp, Artificial Sequence
  Description of Artificial Sequence: Synthetic oligonucleotide
accccgtcctggaaaccagg

SEQ ID NO: 912 - DNA, 20 bp, Artificial Sequence
  Description of Artificial Sequence: Synthetic oligonucleotide
ccccgtcctggaaaccagga

SEQ ID NO: 913 - DNA, 20 bp, Artificial Sequence
  Description of Artificial Sequence: Synthetic oligonucleotide
  Description of Combined DNA/RNA Molecule: Synthetic oligonucleotide
gcuuagcgcccacctcaccc

SEQ ID NO: 914 - RNA, 20 nt, Artificial Sequence
  Description of Artificial Sequence: Synthetic oligonucleotide
ggcuuagcgcccaccucacc

SEQ ID NO: 915 - DNA, 20 bp, Artificial Sequence
  Description of Artificial Sequence: Synthetic oligonucleotide
  Description of Combined DNA/RNA Molecule: Synthetic oligonucleotide
cccgucctggaaaccaggag

SEQ ID NO: 916 - DNA, 20 bp, Artificial Sequence
  Description of Artificial Sequence: Synthetic oligonucleotide
  Description of Combined DNA/RNA Molecule: Synthetic oligonucleotide
ugaaccccgtcctggaaacc

SEQ ID NO: 917 - DNA, 20 bp, Artificial Sequence
  Description of Artificial Sequence: Synthetic oligonucleotide
  Description of Combined DNA/RNA Molecule: Synthetic oligonucleotide
uuucccctccctcatcaaca

SEQ ID NO: 918 - DNA, 20 bp, Artificial Sequence
  Description of Artificial Sequence: Synthetic oligonucleotide
  Description of Combined DNA/RNA Molecule: Synthetic oligonucleotide
agcuccagtccctgaaggug

SEQ ID NO: 919 - DNA, 20 bp, Artificial Sequence
  Description of Artificial Sequence: Synthetic oligonucleotide
  Description of Combined DNA/RNA Molecule: Synthetic oligonucleotide
aggcutagcgcccaccucac

SEQ ID NO: 920 - DNA, 20 bp, Artificial Sequence
  Description of Artificial Sequence: Synthetic oligonucleotide
  Description of Combined DNA/RNA Molecule: Synthetic oligonucleotide
guuucccctccctcaucaac

SEQ ID NO: 921 - DNA, 20 bp, Artificial Sequence
  Description of Artificial Sequence: Synthetic oligonucleotide
aaccccgtcctggaaaccag

SEQ ID NO: 922 - DNA, 20 bp, Artificial Sequence
  Description of Artificial Sequence: Synthetic oligonucleotide
gaaccccgtcctggaaacca

SEQ ID NO: 923 - DNA, 20 bp, Artificial Sequence
  Description of Artificial Sequence: Synthetic oligonucleotide
  Description of Combined DNA/RNA Molecule: Synthetic oligonucleotide
gcuccagtccctgaaggugu

SEQ ID NO: 924 - DNA, 20 bp, Artificial Sequence
  Description of Artificial Sequence: Synthetic oligonucleotide
  Description of Combined DNA/RNA Molecule: Synthetic oligonucleotide
uugaaccccgtcctggaaac

SEQ ID NO: 925 - DNA, 20 bp, Artificial Sequence
  Description of Artificial Sequence: Synthetic oligonucleotide
  Description of Combined DNA/RNA Molecule: Synthetic oligonucleotide
uucccctccctcatcaacaa

SEQ ID NO: 926 - DNA, 20 bp, Artificial Sequence
  Description of Artificial Sequence: Synthetic oligonucleotide
  Description of Combined DNA/RNA Molecule: Synthetic oligonucleotide
ccgucctggaaaccaggagu

SEQ ID NO: 927 - DNA, 20 bp, Artificial Sequence
  Description of Artificial Sequence: Synthetic oligonucleotide
gcagctccagtccctgaagg

SEQ ID NO: 928 - DNA, 20 bp, Artificial Sequence
  Description of Artificial Sequence: Synthetic oligonucleotide
  Description of Combined DNA/RNA Molecule: Synthetic oligonucleotide
ugccaggctggttatgacuc

SEQ ID NO: 929 - DNA, 20 bp, Artificial Sequence
  Description of Artificial Sequence: Synthetic oligonucleotide
  Description of Combined DNA/RNA Molecule: Synthetic oligonucleotide
cgucctggaaaccaggagug

SEQ ID NO: 930 - DNA, 20 bp, Artificial Sequence
  Description of Artificial Sequence: Synthetic oligonucleotide
  Description of Combined DNA/RNA Molecule: Synthetic oligonucleotide
cagcuccagtccctgaaggu

SEQ ID NO: 931 - DNA, 20 bp, Artificial Sequence
  Description of Artificial Sequence: Synthetic oligonucleotide
  Description of Combined DNA/RNA Molecule: Synthetic oligonucleotide
cugccaggctggttaugacu

SEQ ID NO: 932 - RNA, 20 nt, Artificial Sequence
  Description of Artificial Sequence: Synthetic oligonucleotide
uccuggaaaccaggagugcc

SEQ ID NO: 933 - DNA, 20 bp, Artificial Sequence
  Description of Artificial Sequence: Synthetic oligonucleotide
  Description of Combined DNA/RNA Molecule: Synthetic oligonucleotide
aaggcttagcgcccaccuca

SEQ ID NO: 934 - DNA, 20 bp, Artificial Sequence
  Description of Artificial Sequence: Synthetic oligonucleotide
  Description of Combined DNA/RNA Molecule: Synthetic oligonucleotide
ccaggctggttatgacucag

SEQ ID NO: 935 - RNA, 20 nt, Artificial Sequence
  Description of Artificial Sequence: Synthetic oligonucleotide
ccuggaaaccaggagugcca

SEQ ID NO: 936 - DNA, 20 bp, Artificial Sequence
  Description of Artificial Sequence: Synthetic oligonucleotide
  Description of Combined DNA/RNA Molecule: Synthetic oligonucleotide
gccaggctggttatgacuca

SEQ ID NO: 937 - DNA, 20 bp, Artificial Sequence
  Description of Artificial Sequence: Synthetic oligonucleotide
  Description of Combined DNA/RNA Molecule: Synthetic oligonucleotide
aaaggcttagcgcccaccuc

SEQ ID NO: 938 - DNA, 20 bp, Artificial Sequence
  Description of Artificial Sequence: Synthetic oligonucleotide
  Description of Combined DNA/RNA Molecule: Synthetic oligonucleotide
ggauugggagttactugcca

SEQ ID NO: 939 - RNA, 20 nt, Artificial Sequence
  Description of Artificial Sequence: Synthetic oligonucleotide
guccuggaaaccaggagugc

SEQ ID NO: 940 - DNA, 20 bp, Artificial Sequence
  Description of Artificial Sequence: Synthetic oligonucleotide
  Description of Combined DNA/RNA Molecule: Synthetic oligonucleotide
caggctggttatgacucaga

SEQ ID NO: 941 - DNA, 20 bp, Artificial Sequence
  Description of Artificial Sequence: Synthetic oligonucleotide
  Description of Combined DNA/RNA Molecule: Synthetic oligonucleotide
gggagttacttgccaacuug

SEQ ID NO: 942 - DNA, 20 bp, Artificial Sequence
  Description of Artificial Sequence: Synthetic oligonucleotide
  Description of Combined DNA/RNA Molecule: Synthetic oligonucleotide
ugggagttacttgccaacuu

SEQ ID NO: 943 - DNA, 20 bp, Artificial Sequence
  Description of Artificial Sequence: Synthetic oligonucleotide
  Description of Combined DNA/RNA Molecule: Synthetic oligonucleotide
uugggagttacttgccaacu

SEQ ID NO: 944 - DNA, 20 bp, Artificial Sequence
  Description of Artificial Sequence: Synthetic oligonucleotide
  Description of Combined DNA/RNA Molecule: Synthetic oligonucleotide
auuucctcaacactcagccu

SEQ ID NO: 945 - DNA, 20 bp, Artificial Sequence
  Description of Artificial Sequence: Synthetic oligonucleotide
  Description of Combined DNA/RNA Molecule: Synthetic oligonucleotide
ccccuccctcatcaacaaaa

SEQ ID NO: 946 - DNA, 20 bp, Artificial Sequence
  Description of Artificial Sequence: Synthetic oligonucleotide
  Description of Combined DNA/RNA Molecule: Synthetic oligonucleotide
acauutccacttgccaguua

SEQ ID NO: 947 - DNA, 20 bp, Artificial Sequence
  Description of Artificial Sequence: Synthetic oligonucleotide
  Description of Combined DNA/RNA Molecule: Synthetic oligonucleotide
aaaaggcttagcgcccaccu

SEQ ID NO: 948 - DNA, 20 bp, Artificial Sequence
  Description of Artificial Sequence: Synthetic oligonucleotide
  Description of Combined DNA/RNA Molecule: Synthetic oligonucleotide
accugtctgaggcaaacgaa

SEQ ID NO: 949 - DNA, 20 bp, Artificial Sequence
  Description of Artificial Sequence: Synthetic oligonucleotide
  Description of Combined DNA/RNA Molecule: Synthetic oligonucleotide
auugggagttacttgccaac

SEQ ID NO: 950 - RNA, 20 nt, Artificial Sequence
  Description of Artificial Sequence: Synthetic oligonucleotide
ucaacaaaagcccacccucu

SEQ ID NO: 951 - DNA, 20 bp, Artificial Sequence
  Description of Artificial Sequence: Synthetic oligonucleotide
  Description of Combined DNA/RNA Molecule: Synthetic oligonucleotide
cuaagatgctagcttggcca

SEQ ID NO: 952 - DNA, 20 bp, Artificial Sequence
  Description of Artificial Sequence: Synthetic oligonucleotide
gggtcagctgccaatgctag

SEQ ID NO: 953 - DNA, 20 bp, Artificial Sequence
  Description of Artificial Sequence: Synthetic oligonucleotide
gggtcagctgccaatgctag

SEQ ID NO: 954 - DNA, 20 bp, Artificial Sequence
  Description of Artificial Sequence: Synthetic oligonucleotide
gggtcagctgccaatgctag

SEQ ID NO: 955 - DNA, 20 bp, Artificial Sequence
  Description of Artificial Sequence: Synthetic oligonucleotide
gggtcagctgccaatgctag

SEQ ID NO: 956 - DNA, 20 bp, Artificial Sequence
  Description of Artificial Sequence: Synthetic oligonucleotide
gggtcagctgccaatgctag

SEQ ID NO: 957 - RNA, 20 nt, Artificial Sequence
  Description of Artificial Sequence: Synthetic oligonucleotide
ucaaggaagauggcauuucu

SEQ ID NO: 958 - RNA, 20 nt, Artificial Sequence
  Description of Artificial Sequence: Synthetic oligonucleotide
ucaaggaagauggcauuucu

SEQ ID NO: 959 - RNA, 20 nt, Artificial Sequence
  Description of Artificial Sequence: Synthetic oligonucleotide
ggccaaaccucggcuuaccu

SEQ ID NO: 960 - RNA, 30 nt, Artificial Sequence; identical to SEQ ID NO: 208
  Description of Artificial Sequence: Synthetic oligonucleotide

SEQ ID NO: 961 - RNA, 25 nt, Artificial Sequence
  Description of Artificial Sequence: Synthetic oligonucleotide
accagaguaacagucugaguaggag

SEQ ID NO: 962 - RNA, 25 nt, Artificial Sequence
  Description of Artificial Sequence: Synthetic oligonucleotide
caccagaguaacagucugaguagga

SEQ ID NO: 963 - RNA, 25 nt, Artificial Sequence
  Description of Artificial Sequence: Synthetic oligonucleotide
ucaccagaguaacagucugaguagg

SEQ ID NO: 964 - RNA, 25 nt, Artificial Sequence
  Description of Artificial Sequence: Synthetic oligonucleotide
gucaccagaguaacagucugaguag

SEQ ID NO: 965 - RNA, 25 nt, Artificial Sequence
  Description of Artificial Sequence: Synthetic oligonucleotide
guugugucaccagaguaacagucug

SEQ ID NO: 966 - RNA, 25 nt, Artificial Sequence
  Description of Artificial Sequence: Synthetic oligonucleotide
gguugugucaccagaguaacagucu

SEQ ID NO: 967 - RNA, 25 nt, Artificial Sequence
  Description of Artificial Sequence: Synthetic oligonucleotide
agguugugucaccagaguaacaguc

SEQ ID NO: 968 - RNA, 25 nt, Artificial Sequence
  Description of Artificial Sequence: Synthetic oligonucleotide
cagguugugucaccagaguaacagu

SEQ ID NO: 969 - RNA, 25 nt, Artificial Sequence
  Description of Artificial Sequence: Synthetic oligonucleotide
acagguugugucaccagaguaacag

SEQ ID NO: 970 - RNA, 25 nt, Artificial Sequence
  Description of Artificial Sequence: Synthetic oligonucleotide
ccacagguugugucaccagaguaac

SEQ ID NO: 971 - RNA, 25 nt, Artificial Sequence
  Description of Artificial Sequence: Synthetic oligonucleotide
accacagguugugucaccagaguaa

SEQ ID NO: 972 - RNA, 25 nt, Artificial Sequence
  Description of Artificial Sequence: Synthetic oligonucleotide
aaccacagguugugucaccagagua

SEQ ID NO: 973 - RNA, 25 nt, Artificial Sequence
  Description of Artificial Sequence: Synthetic oligonucleotide
uaaccacagguugugucaccagagu

SEQ ID NO: 974 - RNA, 25 nt, Artificial Sequence
  Description of Artificial Sequence: Synthetic oligonucleotide
guaaccacagguugugucaccagag

SEQ ID NO: 975 - RNA, 25 nt, Artificial Sequence
  Description of Artificial Sequence: Synthetic oligonucleotide
aguaaccacagguugugucaccaga

SEQ ID NO: 976 - RNA, 25 nt, Artificial Sequence
  Description of Artificial Sequence: Synthetic oligonucleotide
uaguaaccacagguugugucaccag

SEQ ID NO: 977 - RNA, 25 nt, Artificial Sequence
  Description of Artificial Sequence: Synthetic oligonucleotide
uuaguaaccacagguugugucacca

SEQ ID NO: 978 - RNA, 25 nt, Artificial Sequence
  Description of Artificial Sequence: Synthetic oligonucleotide
cuuaguaaccacagguugugucacc

SEQ ID NO: 979 - RNA, 25 nt, Artificial Sequence
  Description of Artificial Sequence: Synthetic oligonucleotide
ccuuaguaaccacagguugugucac

SEQ ID NO: 980 - RNA, 25 nt, Artificial Sequence
  Description of Artificial Sequence: Synthetic oligonucleotide
uccuuaguaaccacagguuguguca

SEQ ID NO: 981 - RNA, 25 nt, Artificial Sequence
  Description of Artificial Sequence: Synthetic oligonucleotide
guuuccuuaguaaccacagguugug

SEQ ID NO: 982 - RNA, 25 nt, Artificial Sequence
  Description of Artificial Sequence: Synthetic oligonucleotide
aguuuccuuaguaaccacagguugu

SEQ ID NO: 983 - RNA, 25 nt, Artificial Sequence
  Description of Artificial Sequence: Synthetic oligonucleotide
caguuuccuuaguaaccacagguug

SEQ ID NO: 984 - RNA, 25 nt, Artificial Sequence
  Description of Artificial Sequence: Synthetic oligonucleotide
gcaguuuccuuaguaaccacagguu

SEQ ID NO: 985 - RNA, 25 nt, Artificial Sequence
  Description of Artificial Sequence: Synthetic oligonucleotide
ggcaguuuccuuaguaaccacaggu

SEQ ID NO: 986 - RNA, 25 nt, Artificial Sequence
  Description of Artificial Sequence: Synthetic oligonucleotide
uggcaguuuccuuaguaaccacagg

SEQ ID NO: 987 - RNA, 25 nt, Artificial Sequence
  Description of Artificial Sequence: Synthetic oligonucleotide
auggcaguuuccuuaguaaccacag

SEQ ID NO: 988 - RNA, 25 nt, Artificial Sequence
  Description of Artificial Sequence: Synthetic oligonucleotide
agauggcaguuuccuuaguaaccac

SEQ ID NO: 989 - RNA, 25 nt, Artificial Sequence
  Description of Artificial Sequence: Synthetic oligonucleotide
gagauggcaguuuccuuaguaacca

SEQ ID NO: 990 - RNA, 25 nt, Artificial Sequence
  Description of Artificial Sequence: Synthetic oligonucleotide
ggagauggcaguuuccuuaguaacc

SEQ ID NO: 991 - RNA, 25 nt, Artificial Sequence
  Description of Artificial Sequence: Synthetic oligonucleotide
uggagauggcaguuuccuuaguaac

SEQ ID NO: 992 - RNA, 25 nt, Artificial Sequence
  Description of Artificial Sequence: Synthetic oligonucleotide
uuggagauggcaguuuccuuaguaa

SEQ ID NO: 993 - RNA, 25 nt, Artificial Sequence
  Description of Artificial Sequence: Synthetic oligonucleotide
uuuggagauggcaguuuccuuagua

SEQ ID NO: 994 - RNA, 25 nt, Artificial Sequence
  Description of Artificial Sequence: Synthetic oligonucleotide
aguuuggagauggcaguuuccuuag

SEQ ID NO: 995 - RNA, 25 nt, Artificial Sequence
  Description of Artificial Sequence: Synthetic oligonucleotide
uaguuuggagauggcaguuuccuua

SEQ ID NO: 996 - RNA, 25 nt, Artificial Sequence
  Description of Artificial Sequence: Synthetic oligonucleotide
cuaguuuggagauggcaguuuccuu

SEQ ID NO: 997 - RNA, 25 nt, Artificial Sequence
  Description of Artificial Sequence: Synthetic oligonucleotide
ucuaguuuggagauggcaguuuccu

SEQ ID NO: 998 - RNA, 25 nt, Artificial Sequence
  Description of Artificial Sequence: Synthetic oligonucleotide
uucuaguuuggagauggcaguuucc

SEQ ID NO: 999 - RNA, 25 nt, Artificial Sequence
  Description of Artificial Sequence: Synthetic oligonucleotide
cauuucuaguuuggagauggcaguu

SEQ ID NO: 1000 - RNA, 25 nt, Artificial Sequence
  Description of Artificial Sequence: Synthetic oligonucleotide
gcauuucuaguuuggagauggcagu

SEQ ID NO: 1001 - RNA, 25 nt, Artificial Sequence
  Description of Artificial Sequence: Synthetic oligonucleotide
auggcauuucuaguuuggagauggc

SEQ ID NO: 1002 - RNA, 25 nt, Artificial Sequence
  Description of Artificial Sequence: Synthetic oligonucleotide
gaagauggcauuucuaguuuggaga

SEQ ID NO: 1003 - RNA, 25 nt, Artificial Sequence
  Description of Artificial Sequence: Synthetic oligonucleotide
aggaagauggcauuucuaguuugga

SEQ ID NO: 1004 - RNA, 25 nt, Artificial Sequence
  Description of Artificial Sequence: Synthetic oligonucleotide
aaggaagauggcauuucuaguuugg

SEQ ID NO: 1005 - RNA, 25 nt, Artificial Sequence
  Description of Artificial Sequence: Synthetic oligonucleotide
caaggaagauggcauuucuaguuug

SEQ ID NO: 1006 - RNA, 25 nt, Artificial Sequence
  Description of Artificial Sequence: Synthetic oligonucleotide
caucaaggaagauggcauuucuagu

SEQ ID NO: 1007 - RNA, 25 nt, Artificial Sequence
  Description of Artificial Sequence: Synthetic oligonucleotide
acaucaaggaagauggcauuucuag

SEQ ID NO: 1008 - RNA, 25 nt, Artificial Sequence
  Description of Artificial Sequence: Synthetic oligonucleotide
aacaucaaggaagauggcauuucua

SEQ ID NO: 1009 - RNA, 25 nt, Artificial Sequence
  Description of Artificial Sequence: Synthetic oligonucleotide
caacaucaaggaagauggcauuucu

SEQ ID NO: 1010 - RNA, 25 nt, Artificial Sequence
  Description of Artificial Sequence: Synthetic oligonucleotide
cuccaacaucaaggaagauggcauu

SEQ ID NO: 1011 - RNA, 25 nt, Artificial Sequence
  Description of Artificial Sequence: Synthetic oligonucleotide
accuccaacaucaaggaagauggca

SEQ ID NO: 1012 - RNA, 25 nt, Artificial Sequence
  Description of Artificial Sequence: Synthetic oligonucleotide
guaccuccaacaucaaggaagaugg

SEQ ID NO: 1013 - RNA, 25 nt, Artificial Sequence
  Description of Artificial Sequence: Synthetic oligonucleotide
agguaccuccaacaucaaggaagau

SEQ ID NO: 1014 - RNA, 25 nt, Artificial Sequence
  Description of Artificial Sequence: Synthetic oligonucleotide
agagcagguaccuccaacaucaagg

SEQ ID NO: 1015 - RNA, 25 nt, Artificial Sequence
  Description of Artificial Sequence: Synthetic oligonucleotide
cagagcagguaccuccaacaucaag

SEQ ID NO: 1016 - RNA, 25 nt, Artificial Sequence
  Description of Artificial Sequence: Synthetic oligonucleotide
cugccagagcagguaccuccaacau

SEQ ID NO: 1017 - RNA, 25 nt, Artificial Sequence
  Description of Artificial Sequence: Synthetic oligonucleotide
ucugccagagcagguaccuccaaca

SEQ ID NO: 1018 - RNA, 25 nt, Artificial Sequence
  Description of Artificial Sequence: Synthetic oligonucleotide
aucugccagagcagguaccuccaac

SEQ ID NO: 1019 - RNA, 25 nt, Artificial Sequence
  Description of Artificial Sequence: Synthetic oligonucleotide
aaucugccagagcagguaccuccaa

SEQ ID NO: 1020 - RNA, 25 nt, Artificial Sequence
  Description of Artificial Sequence: Synthetic oligonucleotide
aaaucugccagagcagguaccucca

SEQ ID NO: 1021 - RNA, 25 nt, Artificial Sequence
  Description of Artificial Sequence: Synthetic oligonucleotide
gaaaucugccagagcagguaccucc

SEQ ID NO: 1022 - RNA, 25 nt, Artificial Sequence
  Description of Artificial Sequence: Synthetic oligonucleotide
ugaaaucugccagagcagguaccuc

SEQ ID NO: 1023 - RNA, 25 nt, Artificial Sequence
  Description of Artificial Sequence: Synthetic oligonucleotide
uugaaaucugccagagcagguaccu

SEQ ID NO: 1024 - RNA, 25 nt, Artificial Sequence
  Description of Artificial Sequence: Synthetic oligonucleotide
cccgguugaaaucugccagagcagg

SEQ ID NO: 1025 - RNA, 25 nt, Artificial Sequence
  Description of Artificial Sequence: Synthetic oligonucleotide
ccaagcccgguugaaaucugccaga

SEQ ID NO: 1026 - RNA, 25 nt, Artificial Sequence
  Description of Artificial Sequence: Synthetic oligonucleotide
uccaagcccgguugaaaucugccag

SEQ ID NO: 1027 - RNA, 25 nt, Artificial Sequence
  Description of Artificial Sequence: Synthetic oligonucleotide
guccaagcccgguugaaaucugcca

SEQ ID NO: 1028 - RNA, 25 nt, Artificial Sequence
  Description of Artificial Sequence: Synthetic oligonucleotide
ucuguccaagcccgguugaaaucug

SEQ ID NO: 1029 - RNA, 25 nt, Artificial Sequence
  Description of Artificial Sequence: Synthetic oligonucleotide
uucuguccaagcccgguugaaaucu

SEQ ID NO: 1030 - RNA, 25 nt, Artificial Sequence
  Description of Artificial Sequence: Synthetic oligonucleotide
guucuguccaagcccgguugaaauc

SEQ ID NO: 1031 - RNA, 25 nt, Artificial Sequence
  Description of Artificial Sequence: Synthetic oligonucleotide
aguucuguccaagcccgguugaaau

SEQ ID NO: 1032 - RNA, 25 nt, Artificial Sequence
  Description of Artificial Sequence: Synthetic oligonucleotide
aaguucuguccaagcccgguugaaa

SEQ ID NO: 1033 - RNA, 25 nt, Artificial Sequence
  Description of Artificial Sequence: Synthetic oligonucleotide
uaaguucuguccaagcccgguugaa

SEQ ID NO: 1034 - RNA, 25 nt, Artificial Sequence
  Description of Artificial Sequence: Synthetic oligonucleotide
guaaguucuguccaagcccgguuga

SEQ ID NO: 1035 - RNA, 25 nt, Artificial Sequence
  Description of Artificial Sequence: Synthetic oligonucleotide
gguaaguucuguccaagcccgguug

SEQ ID NO: 1036 - RNA, 25 nt, Artificial Sequence
  Description of Artificial Sequence: Synthetic oligonucleotide
cgguaaguucuguccaagcccgguu

SEQ ID NO: 1037 - RNA, 25 nt, Artificial Sequence
  Description of Artificial Sequence: Synthetic oligonucleotide
ucgguaaguucuguccaagcccggu

SEQ ID NO: 1038 - RNA, 25 nt, Artificial Sequence
  Description of Artificial Sequence: Synthetic oligonucleotide
gucgguaaguucuguccaagcccgg

SEQ ID NO: 1039 - RNA, 25 nt, Artificial Sequence
  Description of Artificial Sequence: Synthetic oligonucleotide
agucgguaaguucuguccaagcccg

SEQ ID NO: 1040 - RNA, 25 nt, Artificial Sequence
  Description of Artificial Sequence: Synthetic oligonucleotide
cagucgguaaguucuguccaagccc

SEQ ID NO: 1041 - RNA, 25 nt, Artificial Sequence
  Description of Artificial Sequence: Synthetic oligonucleotide
aaagccagucgguaaguucugucca

SEQ ID NO: 1042 - RNA, 25 nt, Artificial Sequence
  Description of Artificial Sequence: Synthetic oligonucleotide
gaaagccagucgguaaguucugucc

SEQ ID NO: 1043 - RNA, 25 nt, Artificial Sequence
  Description of Artificial Sequence: Synthetic oligonucleotide
gucacccaccaucacccucugugau

SEQ ID NO: 1044 - RNA, 25 nt, Artificial Sequence
  Description of Artificial Sequence: Synthetic oligonucleotide
ggucacccaccaucacccucuguga

SEQ ID NO: 1045 - RNA, 25 nt, Artificial Sequence
  Description of Artificial Sequence: Synthetic oligonucleotide
aaggucacccaccaucacccucugu

SEQ ID NO: 1046 - RNA, 25 nt, Artificial Sequence
  Description of Artificial Sequence: Synthetic oligonucleotide
caaggucacccaccaucacccucug

SEQ ID NO: 1047 - RNA, 25 nt, Artificial Sequence
  Description of Artificial Sequence: Synthetic oligonucleotide
ucaaggucacccaccaucacccucu

SEQ ID NO: 1048 - RNA, 25 nt, Artificial Sequence
  Description of Artificial Sequence: Synthetic oligonucleotide
cucaaggucacccaccaucacccuc

SEQ ID NO: 1049 - RNA, 25 nt, Artificial Sequence
  Description of Artificial Sequence: Synthetic oligonucleotide
cuugaucaagcagagaaagccaguc

SEQ ID NO: 1050 - RNA, 25 nt, Artificial Sequence
  Description of Artificial Sequence: Synthetic oligonucleotide
auaacuugaucaagcagagaaagcc

SEQ ID NO: 1051 - RNA, 20 nt, Artificial Sequence
  Description of Artificial Sequence: Synthetic oligonucleotide
aguaacagucugaguaggag

SEQ ID NO: 1052 - RNA, 20 nt, Artificial Sequence
  Description of Artificial Sequence: Synthetic oligonucleotide
gaguaacagucugaguagga

SEQ ID NO: 1053 - RNA, 20 nt, Artificial Sequence
  Description of Artificial Sequence: Synthetic oligonucleotide
agaguaacagucugaguagg

SEQ ID NO: 1054 - RNA, 20 nt, Artificial Sequence
  Description of Artificial Sequence: Synthetic oligonucleotide
cagaguaacagucugaguag

SEQ ID NO: 1055 - RNA, 20 nt, Artificial Sequence
  Description of Artificial Sequence: Synthetic oligonucleotide
gucaccagaguaacagucug

SEQ ID NO: 1056 - RNA, 20 nt, Artificial Sequence
  Description of Artificial Sequence: Synthetic oligonucleotide
ugucaccagaguaacagucu

SEQ ID NO: 1057 - RNA, 20 nt, Artificial Sequence
  Description of Artificial Sequence: Synthetic oligonucleotide
gugucaccagaguaacaguc

SEQ ID NO: 1058 - RNA, 20 nt, Artificial Sequence
  Description of Artificial Sequence: Synthetic oligonucleotide
ugugucaccagaguaacagu

SEQ ID NO: 1059 - RNA, 20 nt, Artificial Sequence
  Description of Artificial Sequence: Synthetic oligonucleotide
uugugucaccagaguaacag

SEQ ID NO: 1060 - RNA, 20 nt, Artificial Sequence
  Description of Artificial Sequence: Synthetic oligonucleotide
gguugugucaccagaguaac

SEQ ID NO: 1061 - RNA, 20 nt, Artificial Sequence
  Description of Artificial Sequence: Synthetic oligonucleotide
agguugugucaccagaguaa

SEQ ID NO: 1062 - RNA, 20 nt, Artificial Sequence
  Description of Artificial Sequence: Synthetic oligonucleotide
cagguugugucaccagagua

SEQ ID NO: 1063 - RNA, 20 nt, Artificial Sequence
  Description of Artificial Sequence: Synthetic oligonucleotide
acagguugugucaccagagu

SEQ ID NO: 1064 - RNA, 20 nt, Artificial Sequence
  Description of Artificial Sequence: Synthetic oligonucleotide
cacagguugugucaccagag

SEQ ID NO: 1065 - RNA, 20 nt, Artificial Sequence
  Description of Artificial Sequence: Synthetic oligonucleotide
ccacagguugugucaccaga

SEQ ID NO: 1066 - RNA, 20 nt, Artificial Sequence
  Description of Artificial Sequence: Synthetic oligonucleotide
accacagguugugucaccag

SEQ ID NO: 1067 - RNA, 20 nt, Artificial Sequence
  Description of Artificial Sequence: Synthetic oligonucleotide
aaccacagguugugucacca

SEQ ID NO: 1068 - RNA, 20 nt, Artificial Sequence
  Description of Artificial Sequence: Synthetic oligonucleotide
uaaccacagguugugucacc

SEQ ID NO: 1069 - RNA, 20 nt, Artificial Sequence
  Description of Artificial Sequence: Synthetic oligonucleotide
guaaccacagguugugucac

SEQ ID NO: 1070 - RNA, 20 nt, Artificial Sequence
  Description of Artificial Sequence: Synthetic oligonucleotide
aguaaccacagguuguguca

SEQ ID NO: 1071 - RNA, 20 nt, Artificial Sequence
  Description of Artificial Sequence: Synthetic oligonucleotide
cuuaguaaccacagguugug

SEQ ID NO: 1072 - RNA, 20 nt, Artificial Sequence
  Description of Artificial Sequence: Synthetic oligonucleotide
ccuuaguaaccacagguugu

SEQ ID NO: 1073 - RNA, 20 nt, Artificial Sequence
  Description of Artificial Sequence: Synthetic oligonucleotide
uccuuaguaaccacagguug

SEQ ID NO: 1074 - RNA, 20 nt, Artificial Sequence
  Description of Artificial Sequence: Synthetic oligonucleotide
uuccuuaguaaccacagguu

SEQ ID NO: 1075 - RNA, 20 nt, Artificial Sequence
  Description of Artificial Sequence: Synthetic oligonucleotide
uuuccuuaguaaccacaggu

SEQ ID NO: 1076 - RNA, 20 nt, Artificial Sequence
  Description of Artificial Sequence: Synthetic oligonucleotide
guuuccuuaguaaccacagg

SEQ ID NO: 1077 - RNA, 20 nt, Artificial Sequence
  Description of Artificial Sequence: Synthetic oligonucleotide
aguuuccuuaguaaccacag

SEQ ID NO: 1078 - RNA, 20 nt, Artificial Sequence
  Description of Artificial Sequence: Synthetic oligonucleotide
gcaguuuccuuaguaaccac

SEQ ID NO: 1079 - RNA, 20 nt, Artificial Sequence
  Description of Artificial Sequence: Synthetic oligonucleotide
ggcaguuuccuuaguaacca

SEQ ID NO: 1080 - RNA, 20 nt, Artificial Sequence
  Description of Artificial Sequence: Synthetic oligonucleotide
uggcaguuuccuuaguaacc

SEQ ID NO: 1081 - RNA, 20 nt, Artificial Sequence
  Description of Artificial Sequence: Synthetic oligonucleotide
auggcaguuuccuuaguaac

SEQ ID NO: 1082 - RNA, 20 nt, Artificial Sequence
  Description of Artificial Sequence: Synthetic oligonucleotide
gauggcaguuuccuuaguaa

SEQ ID NO: 1083 - RNA, 20 nt, Artificial Sequence
  Description of Artificial Sequence: Synthetic oligonucleotide
agauggcaguuuccuuagua

SEQ ID NO: 1084 - RNA, 20 nt, Artificial Sequence
  Description of Artificial Sequence: Synthetic oligonucleotide
ggagauggcaguuuccuuag

SEQ ID NO: 1085 - RNA, 20 nt, Artificial Sequence
  Description of Artificial Sequence: Synthetic oligonucleotide
uggagauggcaguuuccuua

SEQ ID NO: 1086 - RNA, 20 nt, Artificial Sequence
  Description of Artificial Sequence: Synthetic oligonucleotide
uuggagauggcaguuuccuu

SEQ ID NO: 1087 - RNA, 20 nt, Artificial Sequence
  Description of Artificial Sequence: Synthetic oligonucleotide
uuuggagauggcaguuuccu

SEQ ID NO: 1088 - RNA, 20 nt, Artificial Sequence
  Description of Artificial Sequence: Synthetic oligonucleotide
guuuggagauggcaguuucc

SEQ ID NO: 1089 - RNA, 20 nt, Artificial Sequence
  Description of Artificial Sequence: Synthetic oligonucleotide
cuaguuuggagauggcaguu

SEQ ID NO: 1090 - RNA, 20 nt, Artificial Sequence
  Description of Artificial Sequence: Synthetic oligonucleotide
ucuaguuuggagauggcagu

SEQ ID NO: 1091 - RNA, 20 nt, Artificial Sequence
  Description of Artificial Sequence: Synthetic oligonucleotide
auuucuaguuuggagauggc

SEQ ID NO: 1092 - RNA, 20 nt, Artificial Sequence
  Description of Artificial Sequence: Synthetic oligonucleotide
uggcauuucuaguuuggaga

SEQ ID NO: 1093 - RNA, 20 nt, Artificial Sequence
  Description of Artificial Sequence: Synthetic oligonucleotide
gauggcauuucuaguuugga

SEQ ID NO: 1094 - RNA, 20 nt, Artificial Sequence
  Description of Artificial Sequence: Synthetic oligonucleotide
agauggcauuucuaguuugg

SEQ ID NO: 1095 - RNA, 20 nt, Artificial Sequence
  Description of Artificial Sequence: Synthetic oligonucleotide
aagauggcauuucuaguuug

SEQ ID NO: 1096 - RNA, 20 nt, Artificial Sequence
  Description of Artificial Sequence: Synthetic oligonucleotide
aggaagauggcauuucuagu

SEQ ID NO: 1097 - RNA, 20 nt, Artificial Sequence
  Description of Artificial Sequence: Synthetic oligonucleotide
aaggaagauggcauuucuag

SEQ ID NO: 1098 - RNA, 20 nt, Artificial Sequence
  Description of Artificial Sequence: Synthetic oligonucleotide
caaggaagauggcauuucua

SEQ ID NO: 1099 - RNA, 20 nt, Artificial Sequence
  Description of Artificial Sequence: Synthetic oligonucleotide
ucaaggaagauggcauuucu

SEQ ID NO: 1100 - RNA, 20 nt, Artificial Sequence
  Description of Artificial Sequence: Synthetic oligonucleotide
acaucaaggaagauggcauu

SEQ ID NO: 1101 - RNA, 20 nt, Artificial Sequence
  Description of Artificial Sequence: Synthetic oligonucleotide
caacaucaaggaagauggca

SEQ ID NO: 1102 - RNA, 20 nt, Artificial Sequence
  Description of Artificial Sequence: Synthetic oligonucleotide
uccaacaucaaggaagaugg

SEQ ID NO: 1103 - RNA, 20 nt, Artificial Sequence
  Description of Artificial Sequence: Synthetic oligonucleotide
ccuccaacaucaaggaagau

SEQ ID NO: 1104 - RNA, 20 nt, Artificial Sequence
  Description of Artificial Sequence: Synthetic oligonucleotide
agguaccuccaacaucaagg

SEQ ID NO: 1105 - RNA, 20 nt, Artificial Sequence
  Description of Artificial Sequence: Synthetic oligonucleotide
cagguaccuccaacaucaag

SEQ ID NO: 1106 - RNA, 20 nt, Artificial Sequence
  Description of Artificial Sequence: Synthetic oligonucleotide
agagcagguaccuccaacau

SEQ ID NO: 1107 - RNA, 20 nt, Artificial Sequence
  Description of Artificial Sequence: Synthetic oligonucleotide
cagagcagguaccuccaaca

SEQ ID NO: 1108 - RNA, 20 nt, Artificial Sequence
  Description of Artificial Sequence: Synthetic oligonucleotide
ccagagcagguaccuccaac

SEQ ID NO: 1109 - RNA, 20 nt, Artificial Sequence
  Description of Artificial Sequence: Synthetic oligonucleotide
gccagagcagguaccuccaa

SEQ ID NO: 1110 - RNA, 20 nt, Artificial Sequence
  Description of Artificial Sequence: Synthetic oligonucleotide
ugccagagcagguaccucca

SEQ ID NO: 1111 - RNA, 20 nt, Artificial Sequence
  Description of Artificial Sequence: Synthetic oligonucleotide
cugccagagcagguaccucc

SEQ ID NO: 1112 - RNA, 20 nt, Artificial Sequence
  Description of Artificial Sequence: Synthetic oligonucleotide
ucugccagagcagguaccuc

SEQ ID NO: 1113 - RNA, 20 nt, Artificial Sequence
  Description of Artificial Sequence: Synthetic oligonucleotide
aucugccagagcagguaccu

SEQ ID NO: 1114 - RNA, 20 nt, Artificial Sequence
  Description of Artificial Sequence: Synthetic oligonucleotide
uugaaaucugccagagcagg

SEQ ID NO: 1115 - RNA, 20 nt, Artificial Sequence
  Description of Artificial Sequence: Synthetic oligonucleotide
cccgguugaaaucugccaga

SEQ ID NO: 1116 - RNA, 20 nt, Artificial Sequence
  Description of Artificial Sequence: Synthetic oligonucleotide
gcccgguugaaaucugccag

SEQ ID NO: 1117 - RNA, 20 nt, Artificial Sequence
  Description of Artificial Sequence: Synthetic oligonucleotide
agcccgguugaaaucugcca

SEQ ID NO: 1118 - RNA, 20 nt, Artificial Sequence
  Description of Artificial Sequence: Synthetic oligonucleotide
ccaagcccgguugaaaucug

SEQ ID NO: 1119 - RNA, 20 nt, Artificial Sequence
  Description of Artificial Sequence: Synthetic oligonucleotide
uccaagcccgguugaaaucu

SEQ ID NO: 1120 - RNA, 20 nt, Artificial Sequence
  Description of Artificial Sequence: Synthetic oligonucleotide
guccaagcccgguugaaauc

SEQ ID NO: 1121 - RNA, 20 nt, Artificial Sequence
  Description of Artificial Sequence: Synthetic oligonucleotide
uguccaagcccgguugaaau

SEQ ID NO: 1122 - RNA, 20 nt, Artificial Sequence
  Description of Artificial Sequence: Synthetic oligonucleotide
cuguccaagcccgguugaaa

SEQ ID NO: 1123 - RNA, 20 nt, Artificial Sequence
  Description of Artificial Sequence: Synthetic oligonucleotide
ucuguccaagcccgguugaa

SEQ ID NO: 1124 - RNA, 20 nt, Artificial Sequence
  Description of Artificial Sequence: Synthetic oligonucleotide
uucuguccaagcccgguuga

SEQ ID NO: 1125 - RNA, 20 nt, Artificial Sequence
  Description of Artificial Sequence: Synthetic oligonucleotide
guucuguccaagcccgguug

SEQ ID NO: 1126 - RNA, 20 nt, Artificial Sequence
  Description of Artificial Sequence: Synthetic oligonucleotide
aguucuguccaagcccgguu

SEQ ID NO: 1127 - RNA, 20 nt, Artificial Sequence
  Description of Artificial Sequence: Synthetic oligonucleotide
aaguucuguccaagcccggu

SEQ ID NO: 1128 - RNA, 20 nt, Artificial Sequence
  Description of Artificial Sequence: Synthetic oligonucleotide
uaaguucuguccaagcccgg

SEQ ID NO: 1129 - RNA, 20 nt, Artificial Sequence
  Description of Artificial Sequence: Synthetic oligonucleotide
guaaguucuguccaagcccg

SEQ ID NO: 1130 - RNA, 20 nt, Artificial Sequence
  Description of Artificial Sequence: Synthetic oligonucleotide
gguaaguucuguccaagccc

SEQ ID NO: 1131 - RNA, 20 nt, Artificial Sequence
  Description of Artificial Sequence: Synthetic oligonucleotide
cagucgguaaguucugucca

SEQ ID NO: 1132 - RNA, 20 nt, Artificial Sequence
  Description of Artificial Sequence: Synthetic oligonucleotide
ccagucgguaaguucugucc

SEQ ID NO: 1133 - RNA, 20 nt, Artificial Sequence
  Description of Artificial Sequence: Synthetic oligonucleotide
ccaccaucacccucugugau

SEQ ID NO: 1134 - RNA, 20 nt, Artificial Sequence
  Description of Artificial Sequence: Synthetic oligonucleotide
cccaccaucacccucuguga

SEQ ID NO: 1135 - RNA, 20 nt, Artificial Sequence
  Description of Artificial Sequence: Synthetic oligonucleotide
cacccaccaucacccucugu

SEQ ID NO: 1136 - RNA, 20 nt, Artificial Sequence
  Description of Artificial Sequence: Synthetic oligonucleotide
ucacccaccaucacccucug

SEQ ID NO: 1137 - RNA, 20 nt, Artificial Sequence
  Description of Artificial Sequence: Synthetic oligonucleotide
gucacccaccaucacccucu

SEQ ID NO: 1138 - RNA, 20 nt, Artificial Sequence
  Description of Artificial Sequence: Synthetic oligonucleotide
ggucacccaccaucacccuc

SEQ ID NO: 1139 - RNA, 20 nt, Artificial Sequence
  Description of Artificial Sequence: Synthetic oligonucleotide
ucaagcagagaaagccaguc

SEQ ID NO: 1140 - RNA, 20 nt, Artificial Sequence
  Description of Artificial Sequence: Synthetic oligonucleotide
uugaucaagcagagaaagcc

SEQ ID NO: 1141 - RNA, 25 nt, Artificial Sequence
  Description of Artificial Sequence: Synthetic oligonucleotide
caaagaagauggcauuucuaguuug

SEQ ID NO: 1142 - RNA, 20 nt, Artificial Sequence
  Description of Artificial Sequence: Synthetic oligonucleotide
gcaaagaagauggcauuucu

SEQ ID NO: 1143 - RNA, 20 nt, Artificial Sequence
  Description of Artificial Sequence: Synthetic oligonucleotide
gcaaagaagauggcauuucu

SEQ ID NO: 1144 - RNA, 20 nt, Artificial Sequence
  Description of Artificial Sequence: Synthetic oligonucleotide
ucaaggaagauggcauuucu

SEQ ID NO: 1145 - RNA, 20 nt, Artificial Sequence
  Description of Artificial Sequence: Synthetic oligonucleotide
ucaaggaagauggcauuucu

SEQ ID NO: 1146 - RNA, 20 nt, Artificial Sequence
  Description of Artificial Sequence: Synthetic oligonucleotide
ucaaggaagauggcauuucu

SEQ ID NO: 1147 - RNA, 20 nt, Artificial Sequence
  Description of Artificial Sequence: Synthetic oligonucleotide
ucaaggaagauggcauuucu

SEQ ID NO: 1148 - RNA, 20 nt, Artificial Sequence
  Description of Artificial Sequence: Synthetic oligonucleotide
ucaaggaagauggcauuucu

SEQ ID NO: 1149 - RNA, 20 nt, Artificial Sequence
  Description of Artificial Sequence: Synthetic oligonucleotide
ucaaggaagauggcauuucu

SEQ ID NO: 1150 - RNA, 20 nt, Artificial Sequence
  Description of Artificial Sequence: Synthetic oligonucleotide
ucaaggaagauggcauuucu

SEQ ID NO: 1151 - RNA, 20 nt, Artificial Sequence
  Description of Artificial Sequence: Synthetic oligonucleotide
ucaaggaagauggcauuucu

SEQ ID NO: 1152 - RNA, 20 nt, Artificial Sequence
  Description of Artificial Sequence: Synthetic oligonucleotide
ucaaggaagauggcauuucu

SEQ ID NO: 1153 - RNA, 20 nt, Artificial Sequence
  Description of Artificial Sequence: Synthetic oligonucleotide
ucaaggaagauggcauuucu

SEQ ID NO: 1154 - RNA, 20 nt, Artificial Sequence
  Description of Artificial Sequence: Synthetic oligonucleotide
ucaaggaagauggcauuucu

SEQ ID NO: 1155 - RNA, 20 nt, Artificial Sequence
  Description of Artificial Sequence: Synthetic oligonucleotide
ucaaggaagauggcauuucu

SEQ ID NO: 1156 - RNA, 20 nt, Artificial Sequence
  Description of Artificial Sequence: Synthetic oligonucleotide
ucaaggaagauggcauuucu

SEQ ID NO: 1157 - RNA, 20 nt, Artificial Sequence
  Description of Artificial Sequence: Synthetic oligonucleotide
ucaaggaagauggcauuucu

SEQ ID NO: 1158 - RNA, 20 nt, Artificial Sequence
  Description of Artificial Sequence: Synthetic oligonucleotide
ucaaggaagauggcauuucu

SEQ ID NO: 1159 - RNA, 20 nt, Artificial Sequence
  Description of Artificial Sequence: Synthetic oligonucleotide
ucaaggaagauggcauuucu

SEQ ID NO: 1160 - RNA, 20 nt, Artificial Sequence
  Description of Artificial Sequence: Synthetic oligonucleotide
ucaaggaagauggcauuucu

SEQ ID NO: 1161 - RNA, 20 nt, Artificial Sequence
  Description of Artificial Sequence: Synthetic oligonucleotide
ucaaggaagauggcauuucu

SEQ ID NO: 1162 - RNA, 20 nt, Artificial Sequence
  Description of Artificial Sequence: Synthetic oligonucleotide
ucaaggaagauggcauuucu

SEQ ID NO: 1163 - RNA, 20 nt, Artificial Sequence
  Description of Artificial Sequence: Synthetic oligonucleotide
ucaaggaagauggcauuucu

SEQ ID NO: 1164 - RNA, 20 nt, Artificial Sequence
  Description of Artificial Sequence: Synthetic oligonucleotide
ucaaggaagauggcauuucu

SEQ ID NO: 1165 - RNA, 20 nt, Artificial Sequence
  Description of Artificial Sequence: Synthetic oligonucleotide
ucaaggaagauggcauuucu

SEQ ID NO: 1166 - RNA, 20 nt, Artificial Sequence
  Description of Artificial Sequence: Synthetic oligonucleotide
ucaaggaagauggcauuucu

SEQ ID NO: 1167 - RNA, 20 nt, Artificial Sequence
  Description of Artificial Sequence: Synthetic oligonucleotide
ucaaggaagauggcauuucu

SEQ ID NO: 1168 - RNA, 20 nt, Artificial Sequence
  Description of Artificial Sequence: Synthetic oligonucleotide
ucaaggaagauggcauuucu

SEQ ID NO: 1169 - RNA, 20 nt, Artificial Sequence
  Description of Artificial Sequence: Synthetic oligonucleotide
ucaaggaagauggcauuucu

SEQ ID NO: 1170 - RNA, 20 nt, Artificial Sequence
  Description of Artificial Sequence: Synthetic oligonucleotide
ucaaggaagauggcauuucu

SEQ ID NO: 1171 - RNA, 20 nt, Artificial Sequence
  Description of Artificial Sequence: Synthetic oligonucleotide
ucaaggaagauggcauuucu

SEQ ID NO: 1172 - RNA, 20 nt, Artificial Sequence
  Description of Artificial Sequence: Synthetic oligonucleotide
ucaaggaagauggcauuucu

SEQ ID NO: 1173 - RNA, 20 nt, Artificial Sequence
  Description of Artificial Sequence: Synthetic oligonucleotide
ggccaaaccucggcuuaccu

SEQ ID NO: 1174 - RNA, 20 nt, Artificial Sequence
  Description of Artificial Sequence: Synthetic oligonucleotide
ggccaaaccucggcuuaccu

SEQ ID NO: 1175 - RNA, 20 nt, Artificial Sequence
  Description of Artificial Sequence: Synthetic oligonucleotide
ggccaaaccucggcuuaccu

SEQ ID NO: 1176 - RNA, 20 nt, Artificial Sequence
  Description of Artificial Sequence: Synthetic oligonucleotide
ggccaaaccucggcuuaccu

SEQ ID NO: 1177 - RNA, 20 nt, Artificial Sequence
  Description of Artificial Sequence: Synthetic oligonucleotide
ggccaaaccucggcuuaccu

SEQ ID NO: 1178 - RNA, 20 nt, Artificial Sequence
  Description of Artificial Sequence: Synthetic oligonucleotide
ggccaaaccucggcuuaccu

SEQ ID NO: 1179 - RNA, 20 nt, Artificial Sequence
  Description of Artificial Sequence: Synthetic oligonucleotide
ggccaaaccucggcuuaccu

SEQ ID NO: 1180 - RNA, 20 nt, Artificial Sequence
  Description of Artificial Sequence: Synthetic oligonucleotide
ggccaaaccucggcuuaccu

SEQ ID NO: 1181 - RNA, 20 nt, Artificial Sequence
  Description of Artificial Sequence: Synthetic oligonucleotide
ucaaggaagauggcauuucu

SEQ ID NO: 1182 - RNA, 20 nt, Artificial Sequence
  Description of Artificial Sequence: Synthetic oligonucleotide
ucaaggaagauggcauuucu

SEQ ID NO: 1183 - RNA, 20 nt, Artificial Sequence
  Description of Artificial Sequence: Synthetic oligonucleotide
ucaaggaagauggcauuucu

SEQ ID NO: 1184 - RNA, 20 nt, Artificial Sequence
  Description of Artificial Sequence: Synthetic oligonucleotide
ucaaggaagauggcauuucu

SEQ ID NO: 1185 - RNA, 20 nt, Artificial Sequence
  Description of Artificial Sequence: Synthetic oligonucleotide
ucaaggaagauggcauuucu

SEQ ID NO: 1186 - RNA, 20 nt, Artificial Sequence
  Description of Artificial Sequence: Synthetic oligonucleotide
ucaaggaagauggcauuucu

SEQ ID NO: 1187 - RNA, 20 nt, Artificial Sequence
  Description of Artificial Sequence: Synthetic oligonucleotide
ucaaggaagauggcauuucu

SEQ ID NO: 1188 - RNA, 20 nt, Artificial Sequence
  Description of Artificial Sequence: Synthetic oligonucleotide
ucaaggaagauggcauuucu

SEQ ID NO: 1189 - DNA, 20 bp, Artificial Sequence
  Description of Artificial Sequence: Synthetic oligonucleotide
ggccaaacctcggcttacct

SEQ ID NO: 1190 - RNA, 20 nt, Artificial Sequence
  Description of Artificial Sequence: Synthetic oligonucleotide
ggccaaaccucggcuuaccu

SEQ ID NO: 1191 - DNA, 20 bp, Artificial Sequence
  Description of Artificial Sequence: Synthetic oligonucleotide
ggccaaacctcggcttacct

SEQ ID NO: 1192 - DNA, 20 bp, Artificial Sequence
  Description of Artificial Sequence: Synthetic oligonucleotide
ggccaaacctcggcttacct

SEQ ID NO: 1193 - DNA, 20 bp, Artificial Sequence
  Description of Artificial Sequence: Synthetic oligonucleotide
  Description of Combined DNA/RNA Molecule: Synthetic oligonucleotide
ggccaaaccucggcttacct

SEQ ID NO: 1194 - DNA, 20 bp, Artificial Sequence
  Description of Artificial Sequence: Synthetic oligonucleotide
  Description of Combined DNA/RNA Molecule: Synthetic oligonucleotide
ggccaaacctcggcttaccu

SEQ ID NO: 1195 - DNA, 20 bp, Artificial Sequence
  Description of Artificial Sequence: Synthetic oligonucleotide
  Description of Combined DNA/RNA Molecule: Synthetic oligonucleotide
ggccaaaccucggctuaccu

SEQ ID NO: 1196 - DNA, 20 bp, Artificial Sequence
  Description of Artificial Sequence: Synthetic oligonucleotide
  Description of Combined DNA/RNA Molecule: Synthetic oligonucleotide
ggccaaacctcggcutaccu

SEQ ID NO: 1197 - DNA, 20 bp, Artificial Sequence
  Description of Artificial Sequence: Synthetic oligonucleotide
  Description of Combined DNA/RNA Molecule: Synthetic oligonucleotide
ggccaaacctcggctuaccu

SEQ ID NO: 1198 - RNA, 20 nt, Artificial Sequence
  Description of Artificial Sequence: Synthetic oligonucleotide
ggccaaaccucggcuuaccu

SEQ ID NO: 1199 - DNA, 20 bp, Artificial Sequence
  Description of Artificial Sequence: Synthetic oligonucleotide
  Description of Combined DNA/RNA Molecule: Synthetic oligonucleotide
ggccaaacctcggcutaccu

SEQ ID NO: 1200 - DNA, 20 bp, Artificial Sequence
  Description of Artificial Sequence: Synthetic oligonucleotide
  Description of Combined DNA/RNA Molecule: Synthetic oligonucleotide
ggccaaacctcggctuaccu

SEQ ID NO: 1201 - DNA, 20 bp, Artificial Sequence
  Description of Artificial Sequence: Synthetic oligonucleotide
  Description of Combined DNA/RNA Molecule: Synthetic oligonucleotide
ggccaaaccucggcttaccu

SEQ ID NO: 1202 - DNA, 20 bp, Artificial Sequence
  Description of Artificial Sequence: Synthetic oligonucleotide
  Description of Combined DNA/RNA Molecule: Synthetic oligonucleotide
ggccaaaccucggcttacct

SEQ ID NO: 1203 - DNA, 20 bp, Artificial Sequence
  Description of Artificial Sequence: Synthetic oligonucleotide
  Description of Combined DNA/RNA Molecule: Synthetic oligonucleotide
ggccaaacctcggcttaccu

SEQ ID NO: 1204 - DNA, 20 bp, Artificial Sequence
  Description of Artificial Sequence: Synthetic oligonucleotide
  Description of Combined DNA/RNA Molecule: Synthetic oligonucleotide
ggccaaaccucggctuaccu

SEQ ID NO: 1205 - DNA, 20 bp, Artificial Sequence
  Description of Artificial Sequence: Synthetic oligonucleotide
  Description of Combined DNA/RNA Molecule: Synthetic oligonucleotide
ggccaaacctcggcutaccu

SEQ ID NO: 1206 - DNA, 20 bp, Artificial Sequence
  Description of Artificial Sequence: Synthetic oligonucleotide
  Description of Combined DNA/RNA Molecule: Synthetic oligonucleotide
ggccaaacctcggctuaccu

SEQ ID NO: 1207 - RNA, 20 nt, Artificial Sequence
  Description of Artificial Sequence: Synthetic oligonucleotide
ggccaaaccucggcuuaccu

SEQ ID NO: 1208 - DNA, 20 bp, Artificial Sequence
  Description of Artificial Sequence: Synthetic oligonucleotide
  Description of Combined DNA/RNA Molecule: Synthetic oligonucleotide
ggccaaacctcggcutaccu

SEQ ID NO: 1209 - DNA, 20 bp, Artificial Sequence
  Description of Artificial Sequence: Synthetic oligonucleotide
  Description of Combined DNA/RNA Molecule: Synthetic oligonucleotide
ggccaaacctcggctuaccu

SEQ ID NO: 1210 - DNA, 20 bp, Artificial Sequence
  Description of Artificial Sequence: Synthetic oligonucleotide
  Description of Combined DNA/RNA Molecule: Synthetic oligonucleotide
ggccaaaccucggcttaccu

SEQ ID NO: 1211 - DNA, 20 bp, Artificial Sequence
  Description of Artificial Sequence: Synthetic oligonucleotide
  Description of Combined DNA/RNA Molecule: Synthetic oligonucleotide
ggccaaaccucggcutaccu

SEQ ID NO: 1212 - RNA, 20 nt, Artificial Sequence
  Description of Artificial Sequence: Synthetic oligonucleotide
ggccaaaccucggcuuaccu

SEQ ID NO: 1213 - RNA, 20 nt, Artificial Sequence
  Description of Artificial Sequence: Synthetic oligonucleotide
ggccaaaccucggcuuaccu

SEQ ID NO: 1214 - RNA, 20 nt, Artificial Sequence
  Description of Artificial Sequence: Synthetic oligonucleotide
ggccaaaccucggcuuaccu

SEQ ID NO: 1215 - RNA, 20 nt, Artificial Sequence
  Description of Artificial Sequence: Synthetic oligonucleotide
ggccaaaccucggcuuaccu

SEQ ID NO: 1216 - RNA, 20 nt, Artificial Sequence
  Description of Artificial Sequence: Synthetic oligonucleotide
ggccaaaccucggcuuaccu

SEQ ID NO: 1217 - RNA, 20 nt, Artificial Sequence
  Description of Artificial Sequence: Synthetic oligonucleotide
ggccaaaccucggcuuaccu

SEQ ID NO: 1218 - RNA, 20 nt, Artificial Sequence
  Description of Artificial Sequence: Synthetic oligonucleotide
ggccaaaccucggcuuaccu

SEQ ID NO: 1219 - RNA, 20 nt, Artificial Sequence
  Description of Artificial Sequence: Synthetic oligonucleotide
ggccaaaccucggcuuaccu

SEQ ID NO: 1220 - RNA, 20 nt, Artificial Sequence
  Description of Artificial Sequence: Synthetic oligonucleotide
ggccaaaccucggcuuaccu

SEQ ID NO: 1221 - RNA, 20 nt, Artificial Sequence
  Description of Artificial Sequence: Synthetic oligonucleotide
ggccaaaccucggcuuaccu

SEQ ID NO: 1222 - RNA, 20 nt, Artificial Sequence
  Description of Artificial Sequence: Synthetic oligonucleotide
ggccaaaccucggcuuaccu

SEQ ID NO: 1223 - RNA, 25 nt, Artificial Sequence
  Description of Artificial Sequence: Synthetic oligonucleotide
ggccaaaccucggcuuaccugaaau

SEQ ID NO: 1224 - DNA, 20 bp, Artificial Sequence
  Description of Artificial Sequence: Synthetic oligonucleotide
  Description of Combined DNA/RNA Molecule: Synthetic oligonucleotide
ggccaaaccucggcutaccu

SEQ ID NO: 1225 - DNA, 20 bp, Artificial Sequence
  Description of Artificial Sequence: Synthetic oligonucleotide
tcaaggaagatggcatttct

SEQ ID NO: 1226 - RNA, 20 nt, Artificial Sequence
  Description of Artificial Sequence: Synthetic oligonucleotide
ucaaggaagauggcauuucu

SEQ ID NO: 1227 - DNA, 20 bp, Artificial Sequence
  Description of Artificial Sequence: Synthetic oligonucleotide
tcaaggaagatggcatttct

SEQ ID NO: 1228 - DNA, 20 bp, Artificial Sequence
  Description of Artificial Sequence: Synthetic oligonucleotide
tcaaggaagatggcatttct

SEQ ID NO: 1229 - DNA, 20 bp, Artificial Sequence
  Description of Artificial Sequence: Synthetic oligonucleotide
  Description of Combined DNA/RNA Molecule: Synthetic oligonucleotide
tcaaggaagauggcatttct

SEQ ID NO: 1230 - DNA, 20 bp, Artificial Sequence
  Description of Artificial Sequence: Synthetic oligonucleotide
  Description of Combined DNA/RNA Molecule: Synthetic oligonucleotide
ucaaggaagatggcatuucu

SEQ ID NO: 1231 - DNA, 20 bp, Artificial Sequence
  Description of Artificial Sequence: Synthetic oligonucleotide
  Description of Combined DNA/RNA Molecule: Synthetic oligonucleotide
tcaaggaagatggcautucu

SEQ ID NO: 1232 - DNA, 20 bp, Artificial Sequence
  Description of Artificial Sequence: Synthetic oligonucleotide
  Description of Combined DNA/RNA Molecule: Synthetic oligonucleotide
ucaaggaagauggcatutcu

SEQ ID NO: 1233 - DNA, 20 bp, Artificial Sequence
  Description of Artificial Sequence: Synthetic oligonucleotide
  Description of Combined DNA/RNA Molecule: Synthetic oligonucleotide
tcaaggaagatggcauutcu

SEQ ID NO: 1234 - DNA, 20 bp, Artificial Sequence
  Description of Artificial Sequence: Synthetic oligonucleotide
  Description of Combined DNA/RNA Molecule: Synthetic oligonucleotide
tcaaggaagauggcauttcu

SEQ ID NO: 1235 - DNA, 20 bp, Artificial Sequence
  Description of Artificial Sequence: Synthetic oligonucleotide
  Description of Combined DNA/RNA Molecule: Synthetic oligonucleotide
tcaaggaagatggcatttcu

SEQ ID NO: 1236 - DNA, 20 bp, Artificial Sequence
  Description of Artificial Sequence: Synthetic oligonucleotide
  Description of Combined DNA/RNA Molecule: Synthetic oligonucleotide
tcaaggaagatggcauttcu

SEQ ID NO: 1237 - DNA, 20 bp, Artificial Sequence
  Description of Artificial Sequence: Synthetic oligonucleotide
  Description of Combined DNA/RNA Molecule: Synthetic oligonucleotide
ucaaggaagauggcatttcu

SEQ ID NO: 1238 - DNA, 20 bp, Artificial Sequence
  Description of Artificial Sequence: Synthetic oligonucleotide
  Description of Combined DNA/RNA Molecule: Synthetic oligonucleotide
tcaaggaagatggcatttcu

SEQ ID NO: 1239 - DNA, 20 bp, Artificial Sequence
  Description of Artificial Sequence: Synthetic oligonucleotide
  Description of Combined DNA/RNA Molecule: Synthetic oligonucleotide
tcaaggaagauggcatttct

SEQ ID NO: 1240 - DNA, 20 bp, Artificial Sequence
  Description of Artificial Sequence: Synthetic oligonucleotide
  Description of Combined DNA/RNA Molecule: Synthetic oligonucleotide
ucaaggaagatggcatuucu

SEQ ID NO: 1241 - DNA, 20 bp, Artificial Sequence
  Description of Artificial Sequence: Synthetic oligonucleotide
  Description of Combined DNA/RNA Molecule: Synthetic oligonucleotide
tcaaggaagatggcautucu

SEQ ID NO: 1242 - DNA, 20 bp, Artificial Sequence
  Description of Artificial Sequence: Synthetic oligonucleotide
  Description of Combined DNA/RNA Molecule: Synthetic oligonucleotide
ucaaggaagauggcatutcu

SEQ ID NO: 1243 - DNA, 20 bp, Artificial Sequence
  Description of Artificial Sequence: Synthetic oligonucleotide
  Description of Combined DNA/RNA Molecule: Synthetic oligonucleotide
tcaaggaagatggcauutcu

SEQ ID NO: 1244 - DNA, 20 bp, Artificial Sequence
  Description of Artificial Sequence: Synthetic oligonucleotide
  Description of Combined DNA/RNA Molecule: Synthetic oligonucleotide
tcaaggaagauggcauttcu

SEQ ID NO: 1245 - DNA, 20 bp, Artificial Sequence
  Description of Artificial Sequence: Synthetic oligonucleotide
  Description of Combined DNA/RNA Molecule: Synthetic oligonucleotide
tcaaggaagatggcatttcu

SEQ ID NO: 1246 - DNA, 20 bp, Artificial Sequence
  Description of Artificial Sequence: Synthetic oligonucleotide
  Description of Combined DNA/RNA Molecule: Synthetic oligonucleotide
tcaaggaagatggcauttcu

SEQ ID NO: 1247 - DNA, 20 bp, Artificial Sequence
  Description of Artificial Sequence: Synthetic oligonucleotide
  Description of Combined DNA/RNA Molecule: Synthetic oligonucleotide
ucaaggaagauggcatttcu

SEQ ID NO: 1248 - DNA, 20 bp, Artificial Sequence
  Description of Artificial Sequence: Synthetic oligonucleotide
  Description of Combined DNA/RNA Molecule: Synthetic oligonucleotide
tcaaggaagatggcatttcu

SEQ ID NO: 1249 - RNA, 20 nt, Artificial Sequence
  Description of Artificial Sequence: Synthetic oligonucleotide
ucaaggaagauggcauuucu

SEQ ID NO: 1250 - RNA, 20 nt, Artificial Sequence
  Description of Artificial Sequence: Synthetic oligonucleotide
ucaaggaagauggcauuucu

SEQ ID NO: 1251 - RNA, 20 nt, Artificial Sequence
  Description of Artificial Sequence: Synthetic oligonucleotide
ucaaggaagauggcauuucu

SEQ ID NO: 1252 - RNA, 20 nt, Artificial Sequence
  Description of Artificial Sequence: Synthetic oligonucleotide
ucaaggaagauggcauuucu

SEQ ID NO: 1253 - RNA, 20 nt, Artificial Sequence
  Description of Artificial Sequence: Synthetic oligonucleotide
ucaaggaagauggcauuucu

SEQ ID NO: 1254 - RNA, 20 nt, Artificial Sequence
  Description of Artificial Sequence: Synthetic oligonucleotide
ucaaggaagauggcauuucu

SEQ ID NO: 1255 - RNA, 20 nt, Artificial Sequence
  Description of Artificial Sequence: Synthetic oligonucleotide
ucaaggaagauggcauuucu

SEQ ID NO: 1256 - RNA, 20 nt, Artificial Sequence
  Description of Artificial Sequence: Synthetic oligonucleotide
ucaaggaagauggcauuucu

SEQ ID NO: 1257 - RNA, 20 nt, Artificial Sequence
  Description of Artificial Sequence: Synthetic oligonucleotide
ucaaggaagauggcauuucu

SEQ ID NO: 1258 - RNA, 20 nt, Artificial Sequence
  Description of Artificial Sequence: Synthetic oligonucleotide
ucaaggaagauggcauuucu

SEQ ID NO: 1259 - RNA, 20 nt, Artificial Sequence
  Description of Artificial Sequence: Synthetic oligonucleotide
agaaaugccaucuuccuuga

SEQ ID NO: 1260 - RNA, 20 nt, Artificial Sequence
  Description of Artificial Sequence: Synthetic oligonucleotide
ucaaggaagauggcauuucu

SEQ ID NO: 1261 - RNA, 20 nt, Artificial Sequence
  Description of Artificial Sequence: Synthetic oligonucleotide
ucaaggaagauggcauuucu

SEQ ID NO: 1262 - RNA, 20 nt, Artificial Sequence
  Description of Artificial Sequence: Synthetic oligonucleotide
ucaaggaagauggcauuucu

SEQ ID NO: 1263 - RNA, 20 nt, Artificial Sequence
  Description of Artificial Sequence: Synthetic oligonucleotide
ucaaggaagauggcauuucu

SEQ ID NO: 1264 - RNA, 20 nt, Artificial Sequence
  Description of Artificial Sequence: Synthetic oligonucleotide
ucaaggaagauggcauuucu

SEQ ID NO: 1265 - RNA, 20 nt, Artificial Sequence
  Description of Artificial Sequence: Synthetic oligonucleotide
ucaaggaagauggcauuucu

SEQ ID NO: 1266 - RNA, 20 nt, Artificial Sequence
  Description of Artificial Sequence: Synthetic oligonucleotide
ucaaggaagauggcauuucu

SEQ ID NO: 1267 - RNA, 20 nt, Artificial Sequence
  Description of Artificial Sequence: Synthetic oligonucleotide
ucaaggaagauggcauuucu

SEQ ID NO: 1268 - RNA, 20 nt, Artificial Sequence
  Description of Artificial Sequence: Synthetic oligonucleotide
ucaaggaagauggcauuucu

SEQ ID NO: 1269 - RNA, 20 nt, Artificial Sequence
  Description of Artificial Sequence: Synthetic oligonucleotide
ucaaggaagauggcauuucu

SEQ ID NO: 1270 - RNA, 20 nt, Artificial Sequence
  Description of Artificial Sequence: Synthetic oligonucleotide
ucaaggaagauggcauuucu

SEQ ID NO: 1271 - RNA, 20 nt, Artificial Sequence
  Description of Artificial Sequence: Synthetic oligonucleotide
ucaaggaagauggcauuucu

SEQ ID NO: 1272 - RNA, 20 nt, Artificial Sequence
  Description of Artificial Sequence: Synthetic oligonucleotide
ucaaggaagauggcauuucu

SEQ ID NO: 1273 - RNA, 20 nt, Artificial Sequence
  Description of Artificial Sequence: Synthetic oligonucleotide
ucaaggaagauggcauuucu

SEQ ID NO: 1274 - RNA, 20 nt, Artificial Sequence
  Description of Artificial Sequence: Synthetic oligonucleotide
ucaaggaagauggcauuucu

SEQ ID NO: 1275 - RNA, 20 nt, Artificial Sequence
  Description of Artificial Sequence: Synthetic oligonucleotide
ucaaggaagauggcauuucu

SEQ ID NO: 1276 - RNA, 20 nt, Artificial Sequence
  Description of Artificial Sequence: Synthetic oligonucleotide
ucaaggaagauggcauuucu

SEQ ID NO: 1277 - RNA, 20 nt, Artificial Sequence
  Description of Artificial Sequence: Synthetic oligonucleotide
ucaaggaagauggcauuucu

SEQ ID NO: 1278 - RNA, 20 nt, Artificial Sequence
  Description of Artificial Sequence: Synthetic oligonucleotide
ucaaggaagauggcauuucu

SEQ ID NO: 1279 - RNA, 20 nt, Artificial Sequence
  Description of Artificial Sequence: Synthetic oligonucleotide
ucaaggaagauggcauuucu

SEQ ID NO: 1280 - RNA, 20 nt, Artificial Sequence
  Description of Artificial Sequence: Synthetic oligonucleotide
ucaaggaagauggcauuucu

SEQ ID NO: 1281 - RNA, 20 nt, Artificial Sequence
  Description of Artificial Sequence: Synthetic oligonucleotide
ucaaggaagauggcauuucu

SEQ ID NO: 1282 - RNA, 20 nt, Artificial Sequence
  Description of Artificial Sequence: Synthetic oligonucleotide
ucaaggaagauggcauuucu

SEQ ID NO: 1283 - RNA, 20 nt, Artificial Sequence
  Description of Artificial Sequence: Synthetic oligonucleotide
ucaaggaagauggcauuucu

SEQ ID NO: 1284 - RNA, 20 nt, Artificial Sequence
  Description of Artificial Sequence: Synthetic oligonucleotide
ucaaggaagauggcauuucu

SEQ ID NO: 1285 - RNA, 20 nt, Artificial Sequence
  Description of Artificial Sequence: Synthetic oligonucleotide
ucaaggaagauggcauuucu

SEQ ID NO: 1286 - RNA, 20 nt, Artificial Sequence
  Description of Artificial Sequence: Synthetic oligonucleotide
ucaaggaagauggcauuucu

SEQ ID NO: 1287 - RNA, 20 nt, Artificial Sequence
  Description of Artificial Sequence: Synthetic oligonucleotide
ucaaggaagauggcauuucu

SEQ ID NO: 1288 - RNA, 20 nt, Artificial Sequence
  Description of Artificial Sequence: Synthetic oligonucleotide
ucaaggaagauggcauuucu

SEQ ID NO: 1289 - RNA, 20 nt, Artificial Sequence
  Description of Artificial Sequence: Synthetic oligonucleotide
ucaaggaagauggcauuucu

SEQ ID NO: 1290 - RNA, 20 nt, Artificial Sequence
  Description of Artificial Sequence: Synthetic oligonucleotide
ucaaggaagauggcauuucu

SEQ ID NO: 1291 - RNA, 20 nt, Artificial Sequence
  Description of Artificial Sequence: Synthetic oligonucleotide
ucaaggaagauggcauuucu

SEQ ID NO: 1292 - RNA, 20 nt, Artificial Sequence
  Description of Artificial Sequence: Synthetic oligonucleotide
ucaaggaagauggcauuucu

SEQ ID NO: 1293 - RNA, 20 nt, Artificial Sequence
  Description of Artificial Sequence: Synthetic oligonucleotide
ucaaggaagauggcauuucu

SEQ ID NO: 1294 - RNA, 20 nt, Artificial Sequence
  Description of Artificial Sequence: Synthetic oligonucleotide
ucaaggaagauggcauuucu

SEQ ID NO: 1295 - RNA, 20 nt, Artificial Sequence
  Description of Artificial Sequence: Synthetic oligonucleotide
ucaaggaagauggcauuucu

SEQ ID NO: 1296 - RNA, 20 nt, Artificial Sequence
  Description of Artificial Sequence: Synthetic oligonucleotide
ucaaggaagauggcauuucu

SEQ ID NO: 1297 - RNA, 20 nt, Artificial Sequence
  Description of Artificial Sequence: Synthetic oligonucleotide
ucaaggaagauggcauuucu

SEQ ID NO: 1298 - RNA, 20 nt, Artificial Sequence
  Description of Artificial Sequence: Synthetic oligonucleotide
ucaaggaagauggcauuucu

SEQ ID NO: 1299 - RNA, 20 nt, Artificial Sequence
  Description of Artificial Sequence: Synthetic oligonucleotide
ucaaggaagauggcauuucu

SEQ ID NO: 1300 - RNA, 20 nt, Artificial Sequence
  Description of Artificial Sequence: Synthetic oligonucleotide
ucaaggaagauggcauuucu

SEQ ID NO: 1301 - RNA, 20 nt, Artificial Sequence
  Description of Artificial Sequence: Synthetic oligonucleotide
ucaaggaagauggcauuucu

SEQ ID NO: 1302 - RNA, 20 nt, Artificial Sequence
  Description of Artificial Sequence: Synthetic oligonucleotide
ucaaggaagauggcauuucu

SEQ ID NO: 1303 - RNA, 20 nt, Artificial Sequence
  Description of Artificial Sequence: Synthetic oligonucleotide
ucaaggaagauggcauuucu

SEQ ID NO: 1304 - RNA, 20 nt, Artificial Sequence
  Description of Artificial Sequence: Synthetic oligonucleotide
ucaaggaagauggcauuucu

SEQ ID NO: 1305 - RNA, 20 nt, Artificial Sequence
  Description of Artificial Sequence: Synthetic oligonucleotide
ucaaggaagauggcauuucu

SEQ ID NO: 1306 - RNA, 20 nt, Artificial Sequence
  Description of Artificial Sequence: Synthetic oligonucleotide
ucaaggaagauggcauuucu

SEQ ID NO: 1307 - RNA, 20 nt, Artificial Sequence
  Description of Artificial Sequence: Synthetic oligonucleotide
ucaaggaagauggcauuucu

SEQ ID NO: 1308 - RNA, 20 nt, Artificial Sequence
  Description of Artificial Sequence: Synthetic oligonucleotide
ucaaggaagauggcauuucu

SEQ ID NO: 1309 - RNA, 20 nt, Artificial Sequence
  Description of Artificial Sequence: Synthetic oligonucleotide
ucaaggaagauggcauuucu

SEQ ID NO: 1310 - RNA, 20 nt, Artificial Sequence
  Description of Artificial Sequence: Synthetic oligonucleotide
ucaaggaagauggcauuucu

SEQ ID NO: 1311 - RNA, 20 nt, Artificial Sequence
  Description of Artificial Sequence: Synthetic oligonucleotide
ucaaggaagauggcauuucu

SEQ ID NO: 1312 - RNA, 20 nt, Artificial Sequence
  Description of Artificial Sequence: Synthetic oligonucleotide
ucaaggaagauggcauuucu

SEQ ID NO: 1313 - RNA, 20 nt, Artificial Sequence
  Description of Artificial Sequence: Synthetic oligonucleotide
ucaaggaagauggcauuucu

SEQ ID NO: 1314 - RNA, 20 nt, Artificial Sequence
  Description of Artificial Sequence: Synthetic oligonucleotide
ucaaggaagauggcauuucu

SEQ ID NO: 1315 - RNA, 20 nt, Artificial Sequence
  Description of Artificial Sequence: Synthetic oligonucleotide
ucaaggaagauggcauuucu

SEQ ID NO: 1316 - RNA, 20 nt, Artificial Sequence
  Description of Artificial Sequence: Synthetic oligonucleotide
ucaaggaagauggcauuucu

SEQ ID NO: 1317 - RNA, 20 nt, Artificial Sequence
  Description of Artificial Sequence: Synthetic oligonucleotide
ucaaggaagauggcauuucu

SEQ ID NO: 1318 - RNA, 20 nt, Artificial Sequence
  Description of Artificial Sequence: Synthetic oligonucleotide
ucaaggaagauggcauuucu

SEQ ID NO: 1319 - RNA, 20 nt, Artificial Sequence
  Description of Artificial Sequence: Synthetic oligonucleotide
ucaaggaagauggcauuucu

SEQ ID NO: 1320 - RNA, 20 nt, Artificial Sequence
  Description of Artificial Sequence: Synthetic oligonucleotide
ucaaggaagauggcauuucu

SEQ ID NO: 1321 - RNA, 20 nt, Artificial Sequence
  Description of Artificial Sequence: Synthetic oligonucleotide
ucaaggaagauggcauuucu

SEQ ID NO: 1322 - RNA, 20 nt, Artificial Sequence
  Description of Artificial Sequence: Synthetic oligonucleotide
ucaaggaagauggcauuucu

SEQ ID NO: 1323 - RNA, 20 nt, Artificial Sequence
  Description of Artificial Sequence: Synthetic oligonucleotide
ucaaggaagauggcauuucu

SEQ ID NO: 1324 - RNA, 20 nt, Artificial Sequence
  Description of Artificial Sequence: Synthetic oligonucleotide
ucaaggaagauggcauuucu

SEQ ID NO: 1325 - RNA, 20 nt, Artificial Sequence
  Description of Artificial Sequence: Synthetic oligonucleotide
ucaaggaagauggcauuucu

SEQ ID NO: 1326 - RNA, 20 nt, Artificial Sequence
  Description of Artificial Sequence: Synthetic oligonucleotide
ucaaggaagauggcauuucu

SEQ ID NO: 1327 - RNA, 20 nt, Artificial Sequence
  Description of Artificial Sequence: Synthetic oligonucleotide
ucaaggaagauggcauuucu

SEQ ID NO: 1328 - RNA, 20 nt, Artificial Sequence
  Description of Artificial Sequence: Synthetic oligonucleotide
ucaaggaagauggcauuucu

SEQ ID NO: 1329 - RNA, 20 nt, Artificial Sequence
  Description of Artificial Sequence: Synthetic oligonucleotide
ucaaggaagauggcauuucu

SEQ ID NO: 1330 - RNA, 20 nt, Artificial Sequence
  Description of Artificial Sequence: Synthetic oligonucleotide
ucaaggaagauggcauuucu

SEQ ID NO: 1331 - RNA, 20 nt, Artificial Sequence
  Description of Artificial Sequence: Synthetic oligonucleotide
ucaaggaagauggcauuucu

SEQ ID NO: 1332 - RNA, 20 nt, Artificial Sequence
  Description of Artificial Sequence: Synthetic oligonucleotide
ucaaggaagauggcauuucu

SEQ ID NO: 1333 - RNA, 20 nt, Artificial Sequence
  Description of Artificial Sequence: Synthetic oligonucleotide
ucaaggaagauggcauuucu

SEQ ID NO: 1334 - RNA, 20 nt, Artificial Sequence
  Description of Artificial Sequence: Synthetic oligonucleotide
ucaaggaagauggcauuucu

SEQ ID NO: 1335 - RNA, 20 nt, Artificial Sequence
  Description of Artificial Sequence: Synthetic oligonucleotide
ucaaggaagauggcauuucu

SEQ ID NO: 1336 - RNA, 20 nt, Artificial Sequence
  Description of Artificial Sequence: Synthetic oligonucleotide
ucaaggaagauggcauuucu

SEQ ID NO: 1337 - RNA, 20 nt, Artificial Sequence
  Description of Artificial Sequence: Synthetic oligonucleotide
ucaaggaagauggcauuucu

SEQ ID NO: 1338 - RNA, 20 nt, Artificial Sequence
  Description of Artificial Sequence: Synthetic oligonucleotide
ucaaggaagauggcauuucu

SEQ ID NO: 1339 - RNA, 20 nt, Artificial Sequence
  Description of Artificial Sequence: Synthetic oligonucleotide
ucaaggaagauggcauuucu

SEQ ID NO: 1340 - RNA, 20 nt, Artificial Sequence
  Description of Artificial Sequence: Synthetic oligonucleotide
ucaaggaagauggcauuucu

SEQ ID NO: 1341 - RNA, 20 nt, Artificial Sequence
  Description of Artificial Sequence: Synthetic oligonucleotide
ucaaggaagauggcauuucu

SEQ ID NO: 1342 - RNA, 20 nt, Artificial Sequence
  Description of Artificial Sequence: Synthetic oligonucleotide
ucaaggaagauggcauuucu

SEQ ID NO: 1343 - RNA, 20 nt, Artificial Sequence
  Description of Artificial Sequence: Synthetic oligonucleotide
ucaaggaagauggcauuucu

SEQ ID NO: 1344 - RNA, 20 nt, Artificial Sequence
  Description of Artificial Sequence: Synthetic oligonucleotide
ucaaggaagauggcauuucu

SEQ ID NO: 1345 - RNA, 20 nt, Artificial Sequence
  Description of Artificial Sequence: Synthetic oligonucleotide
ucaaggaagauggcauuucu

SEQ ID NO: 1346 - RNA, 20 nt, Artificial Sequence
  Description of Artificial Sequence: Synthetic oligonucleotide
ucaaggaagauggcauuucu

SEQ ID NO: 1347 - RNA, 20 nt, Artificial Sequence
  Description of Artificial Sequence: Synthetic oligonucleotide
ucaaggaagauggcauuucu

SEQ ID NO: 1348 - RNA, 20 nt, Artificial Sequence
  Description of Artificial Sequence: Synthetic oligonucleotide
ucaaggaagauggcauuucu

SEQ ID NO: 1349 - RNA, 20 nt, Artificial Sequence
  Description of Artificial Sequence: Synthetic oligonucleotide
ucaaggaagauggcauuucu

SEQ ID NO: 1350 - RNA, 20 nt, Artificial Sequence
  Description of Artificial Sequence: Synthetic oligonucleotide
ucaaggaagauggcauuucu

SEQ ID NO: 1351 - RNA, 20 nt, Artificial Sequence
  Description of Artificial Sequence: Synthetic oligonucleotide
ucaaggaagauggcauuucu

SEQ ID NO: 1352 - RNA, 20 nt, Artificial Sequence
  Description of Artificial Sequence: Synthetic oligonucleotide
ucaaggaagauggcauuucu

SEQ ID NO: 1353 - RNA, 20 nt, Artificial Sequence
  Description of Artificial Sequence: Synthetic oligonucleotide
ucaaggaagauggcauuucu

SEQ ID NO: 1354 - RNA, 20 nt, Artificial Sequence
  Description of Artificial Sequence: Synthetic oligonucleotide
ucaaggaagauggcauuucu

SEQ ID NO: 1355 - RNA, 20 nt, Artificial Sequence
  Description of Artificial Sequence: Synthetic oligonucleotide
ucaaggaagauggcauuucu

SEQ ID NO: 1356 - RNA, 20 nt, Artificial Sequence
  Description of Artificial Sequence: Synthetic oligonucleotide
ucaaggaagauggcauuucu

SEQ ID NO: 1357 - RNA, 20 nt, Artificial Sequence
  Description of Artificial Sequence: Synthetic oligonucleotide
ucaaggaagauggcauuucu

SEQ ID NO: 1358 - RNA, 20 nt, Artificial Sequence
  Description of Artificial Sequence: Synthetic oligonucleotide
ucaaggaagauggcauuucu

SEQ ID NO: 1359 - RNA, 20 nt, Artificial Sequence
  Description of Artificial Sequence: Synthetic oligonucleotide
ucaaggaagauggcauuucu

SEQ ID NO: 1360 - RNA, 20 nt, Artificial Sequence
  Description of Artificial Sequence: Synthetic oligonucleotide
ucaaggaagauggcauuucu

SEQ ID NO: 1361 - RNA, 20 nt, Artificial Sequence
  Description of Artificial Sequence: Synthetic oligonucleotide
ucaaggaagauggcauuucu

SEQ ID NO: 1362 - RNA, 20 nt, Artificial Sequence
  Description of Artificial Sequence: Synthetic oligonucleotide
ucaaggaagauggcauuucu

SEQ ID NO: 1363 - RNA, 20 nt, Artificial Sequence
  Description of Artificial Sequence: Synthetic oligonucleotide
ucaaggaagauggcauuucu

SEQ ID NO: 1364 - RNA, 20 nt, Artificial Sequence
  Description of Artificial Sequence: Synthetic oligonucleotide
ucaaggaagauggcauuucu

SEQ ID NO: 1365 - RNA, 20 nt, Artificial Sequence
  Description of Artificial Sequence: Synthetic oligonucleotide
ucaaggaagauggcauuucu

SEQ ID NO: 1366 - RNA, 20 nt, Artificial Sequence
  Description of Artificial Sequence: Synthetic oligonucleotide
ucaaggaagauggcauuucu

SEQ ID NO: 1367 - RNA, 20 nt, Artificial Sequence
  Description of Artificial Sequence: Synthetic oligonucleotide
ucaaggaagauggcauuucu

SEQ ID NO: 1368 - RNA, 20 nt, Artificial Sequence
  Description of Artificial Sequence: Synthetic oligonucleotide
ucaaggaagauggcauuucu

SEQ ID NO: 1369 - RNA, 20 nt, Artificial Sequence
  Description of Artificial Sequence: Synthetic oligonucleotide
ucaaggaagauggcauuucu

SEQ ID NO: 1370 - RNA, 20 nt, Artificial Sequence
  Description of Artificial Sequence: Synthetic oligonucleotide
ucaaggaagauggcauuucu

SEQ ID NO: 1371 - RNA, 20 nt, Artificial Sequence
  Description of Artificial Sequence: Synthetic oligonucleotide
ucaaggaagauggcauuucu

SEQ ID NO: 1372 - RNA, 20 nt, Artificial Sequence
  Description of Artificial Sequence: Synthetic oligonucleotide
ucaaggaagauggcauuucu

SEQ ID NO: 1373 - RNA, 20 nt, Artificial Sequence
  Description of Artificial Sequence: Synthetic oligonucleotide
ucaaggaagauggcauuucu

SEQ ID NO: 1374 - RNA, 20 nt, Artificial Sequence
  Description of Artificial Sequence: Synthetic oligonucleotide
ucaaggaagauggcauuucu

SEQ ID NO: 1375 - RNA, 20 nt, Artificial Sequence
  Description of Artificial Sequence: Synthetic oligonucleotide
ucaaggaagauggcauuucu

SEQ ID NO: 1376 - RNA, 20 nt, Artificial Sequence
  Description of Artificial Sequence: Synthetic oligonucleotide
ucaaggaagauggcauuucu

SEQ ID NO: 1377 - RNA, 20 nt, Artificial Sequence
  Description of Artificial Sequence: Synthetic oligonucleotide
ucaaggaagauggcauuucu

SEQ ID NO: 1378 - RNA, 20 nt, Artificial Sequence
  Description of Artificial Sequence: Synthetic oligonucleotide
ucaaggaagauggcauuucu

SEQ ID NO: 1379 - RNA, 20 nt, Artificial Sequence
  Description of Artificial Sequence: Synthetic oligonucleotide
ucaaggaagauggcauuucu

SEQ ID NO: 1380 - RNA, 20 nt, Artificial Sequence
  Description of Artificial Sequence: Synthetic oligonucleotide
ucaaggaagauggcauuucu

SEQ ID NO: 1381 - RNA, 20 nt, Artificial Sequence
  Description of Artificial Sequence: Synthetic oligonucleotide
ucaaggaagauggcauuucu

SEQ ID NO: 1382 - RNA, 20 nt, Artificial Sequence
  Description of Artificial Sequence: Synthetic oligonucleotide
ucaaggaagauggcauuucu

SEQ ID NO: 1383 - RNA, 20 nt, Artificial Sequence
  Description of Artificial Sequence: Synthetic oligonucleotide
ucaaggaagauggcauuucu

SEQ ID NO: 1384 - RNA, 20 nt, Artificial Sequence
  Description of Artificial Sequence: Synthetic oligonucleotide
ucaaggaagauggcauuucu

SEQ ID NO: 1385 - RNA, 20 nt, Artificial Sequence
  Description of Artificial Sequence: Synthetic oligonucleotide
ucaaggaagauggcauuucu

SEQ ID NO: 1386 - RNA, 20 nt, Artificial Sequence
  Description of Artificial Sequence: Synthetic oligonucleotide
ucaaggaagauggcauuucu

SEQ ID NO: 1387 - RNA, 20 nt, Artificial Sequence
  Description of Artificial Sequence: Synthetic oligonucleotide
ucaaggaagauggcauuucu

SEQ ID NO: 1388 - RNA, 20 nt, Artificial Sequence
  Description of Artificial Sequence: Synthetic oligonucleotide
ucaaggaagauggcauuucu

SEQ ID NO: 1389 - RNA, 20 nt, Artificial Sequence
  Description of Artificial Sequence: Synthetic oligonucleotide
ucaaggaagauggcauuucu

SEQ ID NO: 1390 - RNA, 20 nt, Artificial Sequence
  Description of Artificial Sequence: Synthetic oligonucleotide
ucaaggaagauggcauuucu

SEQ ID NO: 1391 - RNA, 20 nt, Artificial Sequence
  Description of Artificial Sequence: Synthetic oligonucleotide
ucaaggaagauggcauuucu

SEQ ID NO: 1392 - RNA, 20 nt, Artificial Sequence
  Description of Artificial Sequence: Synthetic oligonucleotide
ucaaggaagauggcauuucu

SEQ ID NO: 1393 - RNA, 20 nt, Artificial Sequence
  Description of Artificial Sequence: Synthetic oligonucleotide
ucaaggaagauggcauuucu

SEQ ID NO: 1394 - RNA, 20 nt, Artificial Sequence
  Description of Artificial Sequence: Synthetic oligonucleotide
ucaaggaagauggcauuucu

SEQ ID NO: 1395 - RNA, 20 nt, Artificial Sequence
  Description of Artificial Sequence: Synthetic oligonucleotide
ucaaggaagauggcauuucu

SEQ ID NO: 1396 - RNA, 20 nt, Artificial Sequence
  Description of Artificial Sequence: Synthetic oligonucleotide
ucaaggaagauggcauuucu

SEQ ID NO: 1397 - RNA, 20 nt, Artificial Sequence
  Description of Artificial Sequence: Synthetic oligonucleotide
ucaaggaagauggcauuucu

SEQ ID NO: 1398 - RNA, 20 nt, Artificial Sequence
  Description of Artificial Sequence: Synthetic oligonucleotide
ucaaggaagauggcauuucu

SEQ ID NO: 1399 - RNA, 20 nt, Artificial Sequence
  Description of Artificial Sequence: Synthetic oligonucleotide
ucaaggaagauggcauuucu

SEQ ID NO: 1400 - RNA, 20 nt, Artificial Sequence
  Description of Artificial Sequence: Synthetic oligonucleotide
ucaaggaagauggcauuucu

SEQ ID NO: 1401 - RNA, 20 nt, Artificial Sequence
  Description of Artificial Sequence: Synthetic oligonucleotide
ucaaggaagauggcauuucu

SEQ ID NO: 1402 - RNA, 20 nt, Artificial Sequence
  Description of Artificial Sequence: Synthetic oligonucleotide
ucaaggaagauggcauuucu

SEQ ID NO: 1403 - RNA, 20 nt, Artificial Sequence
  Description of Artificial Sequence: Synthetic oligonucleotide
ucaaggaagauggcauuucu

SEQ ID NO: 1404 - RNA, 20 nt, Artificial Sequence
  Description of Artificial Sequence: Synthetic oligonucleotide
ucaaggaagauggcauuucu

SEQ ID NO: 1405 - RNA, 20 nt, Artificial Sequence
  Description of Artificial Sequence: Synthetic oligonucleotide
ucaaggaagauggcauuucu

SEQ ID NO: 1406 - RNA, 20 nt, Artificial Sequence
  Description of Artificial Sequence: Synthetic oligonucleotide
ucaaggaagauggcauuucu

SEQ ID NO: 1407 - RNA, 20 nt, Artificial Sequence
  Description of Artificial Sequence: Synthetic oligonucleotide
ucaaggaagauggcauuucu

SEQ ID NO: 1408 - RNA, 20 nt, Artificial Sequence
  Description of Artificial Sequence: Synthetic oligonucleotide
ucaaggaagauggcauuucu

SEQ ID NO: 1409 - RNA, 20 nt, Artificial Sequence
  Description of Artificial Sequence: Synthetic oligonucleotide
ucaaggaagauggcauuucu

SEQ ID NO: 1410 - RNA, 20 nt, Artificial Sequence
  Description of Artificial Sequence: Synthetic oligonucleotide
ucaaggaagauggcauuucu

SEQ ID NO: 1411 - RNA, 20 nt, Artificial Sequence
  Description of Artificial Sequence: Synthetic oligonucleotide
ucaaggaagauggcauuucu

SEQ ID NO: 1412 - RNA, 20 nt, Artificial Sequence
  Description of Artificial Sequence: Synthetic oligonucleotide
ucaaggaagauggcauuucu

SEQ ID NO: 1413 - RNA, 20 nt, Artificial Sequence
  Description of Artificial Sequence: Synthetic oligonucleotide
ucaaggaagauggcauuucu

SEQ ID NO: 1414 - RNA, 20 nt, Artificial Sequence
  Description of Artificial Sequence: Synthetic oligonucleotide
ucaaggaagauggcauuucu

SEQ ID NO: 1415 - RNA, 20 nt, Artificial Sequence
  Description of Artificial Sequence: Synthetic oligonucleotide
ucaaggaagauggcauuucu

SEQ ID NO: 1416 - RNA, 20 nt, Artificial Sequence
  Description of Artificial Sequence: Synthetic oligonucleotide
ucaaggaagauggcauuucu

SEQ ID NO: 1417 - RNA, 20 nt, Artificial Sequence
  Description of Artificial Sequence: Synthetic oligonucleotide
ucaaggaagauggcauuucu

SEQ ID NO: 1418 - RNA, 20 nt, Artificial Sequence
  Description of Artificial Sequence: Synthetic oligonucleotide
ucaaggaagauggcauuucu

SEQ ID NO: 1419 - RNA, 20 nt, Artificial Sequence
  Description of Artificial Sequence: Synthetic oligonucleotide
ucaaggaagauggcauuucu

SEQ ID NO: 1420 - RNA, 20 nt, Artificial Sequence
  Description of Artificial Sequence: Synthetic oligonucleotide
ucaaggaagauggcauuucu

SEQ ID NO: 1421 - RNA, 20 nt, Artificial Sequence
  Description of Artificial Sequence: Synthetic oligonucleotide
ucaaggaagauggcauuucu

SEQ ID NO: 1422 - RNA, 20 nt, Artificial Sequence
  Description of Artificial Sequence: Synthetic oligonucleotide
ucaaggaagauggcauuucu

SEQ ID NO: 1423 - RNA, 20 nt, Artificial Sequence
  Description of Artificial Sequence: Synthetic oligonucleotide
ucaaggaagauggcauuucu

SEQ ID NO: 1424 - RNA, 20 nt, Artificial Sequence
  Description of Artificial Sequence: Synthetic oligonucleotide
ucaaggaagauggcauuucu

SEQ ID NO: 1425 - RNA, 20 nt, Artificial Sequence
  Description of Artificial Sequence: Synthetic oligonucleotide
ucaaggaagauggcauuucu

SEQ ID NO: 1426 - RNA, 20 nt, Artificial Sequence
  Description of Artificial Sequence: Synthetic oligonucleotide
ucaaggaagauggcauuucu

SEQ ID NO: 1427 - RNA, 20 nt, Artificial Sequence
  Description of Artificial Sequence: Synthetic oligonucleotide
ucaaggaagauggcauuucu

SEQ ID NO: 1428 - RNA, 20 nt, Artificial Sequence
  Description of Artificial Sequence: Synthetic oligonucleotide
ucaaggaagauggcauuucu

SEQ ID NO: 1429 - RNA, 20 nt, Artificial Sequence
  Description of Artificial Sequence: Synthetic oligonucleotide
ucaaggaagauggcauuucu

SEQ ID NO: 1430 - RNA, 20 nt, Artificial Sequence
  Description of Artificial Sequence: Synthetic oligonucleotide
ucaaggaagauggcauuucu

SEQ ID NO: 1431 - RNA, 20 nt, Artificial Sequence
  Description of Artificial Sequence: Synthetic oligonucleotide
ucaaggaagauggcauuucu

SEQ ID NO: 1432 - RNA, 20 nt, Artificial Sequence
  Description of Artificial Sequence: Synthetic oligonucleotide
ucaaggaagauggcauuucu

SEQ ID NO: 1433 - RNA, 20 nt, Artificial Sequence
  Description of Artificial Sequence: Synthetic oligonucleotide
ucaaggaagauggcauuucu

SEQ ID NO: 1434 - RNA, 20 nt, Artificial Sequence
  Description of Artificial Sequence: Synthetic oligonucleotide
ucaaggaagauggcauuucu

SEQ ID NO: 1435 - RNA, 20 nt, Artificial Sequence
  Description of Artificial Sequence: Synthetic oligonucleotide
ucaaggaagauggcauuucu

SEQ ID NO: 1436 - RNA, 20 nt, Artificial Sequence
  Description of Artificial Sequence: Synthetic oligonucleotide
ucaaggaagauggcauuucu

SEQ ID NO: 1437 - RNA, 20 nt, Artificial Sequence
  Description of Artificial Sequence: Synthetic oligonucleotide
ucaaggaagauggcauuucu

SEQ ID NO: 1438 - RNA, 20 nt, Artificial Sequence
  Description of Artificial Sequence: Synthetic oligonucleotide
ucaaggaagauggcauuucu

SEQ ID NO: 1439 - RNA, 20 nt, Artificial Sequence
  Description of Artificial Sequence: Synthetic oligonucleotide
ucaaggaagauggcauuucu

SEQ ID NO: 1440 - RNA, 20 nt, Artificial Sequence
  Description of Artificial Sequence: Synthetic oligonucleotide
ucaaggaagauggcauuucu

SEQ ID NO: 1441 - RNA, 20 nt, Artificial Sequence
  Description of Artificial Sequence: Synthetic oligonucleotide
ucaaggaagauggcauuucu

SEQ ID NO: 1442 - RNA, 20 nt, Artificial Sequence
  Description of Artificial Sequence: Synthetic oligonucleotide
ucaaggaagauggcauuucu

SEQ ID NO: 1443 - RNA, 20 nt, Artificial Sequence
  Description of Artificial Sequence: Synthetic oligonucleotide
ucaaggaagauggcauuucu

SEQ ID NO: 1444 - RNA, 20 nt, Artificial Sequence
  Description of Artificial Sequence: Synthetic oligonucleotide
ucaaggaagauggcauuucu

SEQ ID NO: 1445 - RNA, 20 nt, Artificial Sequence
  Description of Artificial Sequence: Synthetic oligonucleotide
ucaaggaagauggcauuucu

SEQ ID NO: 1446 - RNA, 20 nt, Artificial Sequence
  Description of Artificial Sequence: Synthetic oligonucleotide
ucaaggaagauggcauuucu

SEQ ID NO: 1447 - RNA, 20 nt, Artificial Sequence
  Description of Artificial Sequence: Synthetic oligonucleotide
ucaaggaagauggcauuucu

SEQ ID NO: 1448 - RNA, 20 nt, Artificial Sequence
  Description of Artificial Sequence: Synthetic oligonucleotide
ucaaggaagauggcauuucu

SEQ ID NO: 1449 - RNA, 20 nt, Artificial Sequence
  Description of Artificial Sequence: Synthetic oligonucleotide
ucaaggaagauggcauuucu

SEQ ID NO: 1450 - RNA, 20 nt, Artificial Sequence
  Description of Artificial Sequence: Synthetic oligonucleotide
ucaaggaagauggcauuucu

SEQ ID NO: 1451 - RNA, 20 nt, Artificial Sequence
  Description of Artificial Sequence: Synthetic oligonucleotide
ucaaggaagauggcauuucu

SEQ ID NO: 1452 - RNA, 20 nt, Artificial Sequence
  Description of Artificial Sequence: Synthetic oligonucleotide
ucaaggaagauggcauuucu

SEQ ID NO: 1453 - RNA, 20 nt, Artificial Sequence
  Description of Artificial Sequence: Synthetic oligonucleotide
ucaaggaagauggcauuucu

SEQ ID NO: 1454 - RNA, 20 nt, Artificial Sequence
  Description of Artificial Sequence: Synthetic oligonucleotide
ucaaggaagauggcauuucu

SEQ ID NO: 1455 - RNA, 20 nt, Artificial Sequence
  Description of Artificial Sequence: Synthetic oligonucleotide
ucaaggaagauggcauuucu

SEQ ID NO: 1456 - RNA, 20 nt, Artificial Sequence
  Description of Artificial Sequence: Synthetic oligonucleotide
ucaaggaagauggcauuucu

SEQ ID NO: 1457 - RNA, 20 nt, Artificial Sequence
  Description of Artificial Sequence: Synthetic oligonucleotide
ucaaggaagauggcauuucu

SEQ ID NO: 1458 - RNA, 20 nt, Artificial Sequence
  Description of Artificial Sequence: Synthetic oligonucleotide
ucaaggaagauggcauuucu

SEQ ID NO: 1459 - RNA, 20 nt, Artificial Sequence
  Description of Artificial Sequence: Synthetic oligonucleotide
ucaaggaagauggcauuucu

SEQ ID NO: 1460 - RNA, 20 nt, Artificial Sequence
  Description of Artificial Sequence: Synthetic oligonucleotide
ucaaggaagauggcauuucu

SEQ ID NO: 1461 - RNA, 20 nt, Artificial Sequence
  Description of Artificial Sequence: Synthetic oligonucleotide
ucaaggaagauggcauuucu

SEQ ID NO: 1462 - RNA, 20 nt, Artificial Sequence
  Description of Artificial Sequence: Synthetic oligonucleotide
ucaaggaagauggcauuucu

SEQ ID NO: 1463 - RNA, 20 nt, Artificial Sequence
  Description of Artificial Sequence: Synthetic oligonucleotide
ucaaggaagauggcauuucu

SEQ ID NO: 1464 - RNA, 20 nt, Artificial Sequence
  Description of Artificial Sequence: Synthetic oligonucleotide
ucaaggaagauggcauuucu

SEQ ID NO: 1465 - RNA, 20 nt, Artificial Sequence
  Description of Artificial Sequence: Synthetic oligonucleotide
ucaaggaagauggcauuucu

SEQ ID NO: 1466 - RNA, 20 nt, Artificial Sequence
  Description of Artificial Sequence: Synthetic oligonucleotide
ucaaggaagauggcauuucu

SEQ ID NO: 1467 - RNA, 20 nt, Artificial Sequence
  Description of Artificial Sequence: Synthetic oligonucleotide
ucaaggaagauggcauuucu

SEQ ID NO: 1468 - RNA, 20 nt, Artificial Sequence
  Description of Artificial Sequence: Synthetic oligonucleotide
ucaaggaagauggcauuucu

SEQ ID NO: 1469 - RNA, 20 nt, Artificial Sequence
  Description of Artificial Sequence: Synthetic oligonucleotide
ucaaggaagauggcauuucu

SEQ ID NO: 1470 - RNA, 20 nt, Artificial Sequence
  Description of Artificial Sequence: Synthetic oligonucleotide
ucaaggaagauggcauuucu

SEQ ID NO: 1471 - RNA, 20 nt, Artificial Sequence
  Description of Artificial Sequence: Synthetic oligonucleotide
ucaaggaagauggcauuucu

SEQ ID NO: 1472 - RNA, 20 nt, Artificial Sequence
  Description of Artificial Sequence: Synthetic oligonucleotide
ucaaggaagauggcauuucu

SEQ ID NO: 1473 - RNA, 20 nt, Artificial Sequence
  Description of Artificial Sequence: Synthetic oligonucleotide
ucaaggaagauggcauuucu

SEQ ID NO: 1474 - RNA, 20 nt, Artificial Sequence
  Description of Artificial Sequence: Synthetic oligonucleotide
ucaaggaagauggcauuucu

SEQ ID NO: 1475 - RNA, 20 nt, Artificial Sequence
  Description of Artificial Sequence: Synthetic oligonucleotide
ucaaggaagauggcauuucu

SEQ ID NO: 1476 - RNA, 20 nt, Artificial Sequence
  Description of Artificial Sequence: Synthetic oligonucleotide
ucaaggaagauggcauuucu

SEQ ID NO: 1477 - RNA, 20 nt, Artificial Sequence
  Description of Artificial Sequence: Synthetic oligonucleotide
ucaaggaagauggcauuucu

SEQ ID NO: 1478 - RNA, 20 nt, Artificial Sequence
  Description of Artificial Sequence: Synthetic oligonucleotide
ucaaggaagauggcauuucu

SEQ ID NO: 1479 - RNA, 20 nt, Artificial Sequence
  Description of Artificial Sequence: Synthetic oligonucleotide
ucaaggaagauggcauuucu

SEQ ID NO: 1480 - RNA, 20 nt, Artificial Sequence
  Description of Artificial Sequence: Synthetic oligonucleotide
ucaaggaagauggcauuucu

SEQ ID NO: 1481 - RNA, 20 nt, Artificial Sequence
  Description of Artificial Sequence: Synthetic oligonucleotide
ucaaggaagauggcauuucu

SEQ ID NO: 1482 - RNA, 20 nt, Artificial Sequence
  Description of Artificial Sequence: Synthetic oligonucleotide
ucaaggaagauggcauuucu

SEQ ID NO: 1483 - RNA, 20 nt, Artificial Sequence
  Description of Artificial Sequence: Synthetic oligonucleotide
ucaaggaagauggcauuucu

SEQ ID NO: 1484 - RNA, 20 nt, Artificial Sequence
  Description of Artificial Sequence: Synthetic oligonucleotide
ucaaggaagauggcauuucu

SEQ ID NO: 1485 - RNA, 20 nt, Artificial Sequence
  Description of Artificial Sequence: Synthetic oligonucleotide
ucaaggaagauggcauuucu

SEQ ID NO: 1486 - RNA, 20 nt, Artificial Sequence
  Description of Artificial Sequence: Synthetic oligonucleotide
ucaaggaagauggcauuucu

SEQ ID NO: 1487 - RNA, 20 nt, Artificial Sequence
  Description of Artificial Sequence: Synthetic oligonucleotide
ucaaggaagauggcauuucu

SEQ ID NO: 1488 - RNA, 20 nt, Artificial Sequence
  Description of Artificial Sequence: Synthetic oligonucleotide
ucaaggaagauggcauuucu

SEQ ID NO: 1489 - RNA, 20 nt, Artificial Sequence
  Description of Artificial Sequence: Synthetic oligonucleotide
ucaaggaagauggcauuucu

SEQ ID NO: 1490 - RNA, 20 nt, Artificial Sequence
  Description of Artificial Sequence: Synthetic oligonucleotide
ucaaggaagauggcauuucu

SEQ ID NO: 1491 - RNA, 30 nt, Artificial Sequence; identical to SEQ ID NO: 739
  Description of Artificial Sequence: Synthetic oligonucleotide

SEQ ID NO: 1492 - RNA, 20 nt, Artificial Sequence
  Description of Artificial Sequence: Synthetic oligonucleotide
ucaaggaagauggcauuucu

SEQ ID NO: 1493 - RNA, 20 nt, Artificial Sequence
  Description of Artificial Sequence: Synthetic oligonucleotide
ucaaggaagauggcauuucu

SEQ ID NO: 1494 - RNA, 20 nt, Artificial Sequence
  Description of Artificial Sequence: Synthetic oligonucleotide
ucaaggaagauggcauuucu

SEQ ID NO: 1495 - RNA, 20 nt, Artificial Sequence
  Description of Artificial Sequence: Synthetic oligonucleotide
ucaaggaagauggcauuucu

SEQ ID NO: 1496 - RNA, 20 nt, Artificial Sequence
  Description of Artificial Sequence: Synthetic oligonucleotide
ccuucccugaagguuccucc

SEQ ID NO: 1497 - RNA, 20 nt, Artificial Sequence
  Description of Artificial Sequence: Synthetic oligonucleotide
ccuucccugaagguuccucc

SEQ ID NO: 1498 - RNA, 20 nt, Artificial Sequence
  Description of Artificial Sequence: Synthetic oligonucleotide
ccuucccugaagguuccucc

SEQ ID NO: 1499 - RNA, 20 nt, Artificial Sequence
  Description of Artificial Sequence: Synthetic oligonucleotide
ccuucccugaagguuccucc

SEQ ID NO: 1500 - RNA, 20 nt, Artificial Sequence
  Description of Artificial Sequence: Synthetic oligonucleotide
ccuucccugaagguuccucc

SEQ ID NO: 1501 - RNA, 20 nt, Artificial Sequence
  Description of Artificial Sequence: Synthetic oligonucleotide
ccuucccugaagguuccucc

SEQ ID NO: 1502 - RNA, 20 nt, Artificial Sequence
  Description of Artificial Sequence: Synthetic oligonucleotide
ucaaggaagauggcauuucu

SEQ ID NO: 1503 - RNA, 20 nt, Artificial Sequence
  Description of Artificial Sequence: Synthetic oligonucleotide
ucaaggaagauggcauuucu

SEQ ID NO: 1504 - RNA, 20 nt, Artificial Sequence
  Description of Artificial Sequence: Synthetic oligonucleotide
ucaaggaagauggcauuucu

SEQ ID NO: 1505 - RNA, 19 nt, Artificial Sequence
  Description of Artificial Sequence: Synthetic oligonucleotide
ucaaggaagauggcauuuc

SEQ ID NO: 1506 - RNA, 18 nt, Artificial Sequence
  Description of Artificial Sequence: Synthetic oligonucleotide
ucaaggaagauggcauuu

SEQ ID NO: 1507 - RNA, 19 nt, Artificial Sequence
  Description of Artificial Sequence: Synthetic oligonucleotide
caaggaagauggcauuucu

SEQ ID NO: 1508 - RNA, 20 nt, Artificial Sequence
  Description of Artificial Sequence: Synthetic oligonucleotide
ggccaaaccucggcuuaccu

SEQ ID NO: 1509 - RNA, 20 nt, Artificial Sequence
  Description of Artificial Sequence: Synthetic oligonucleotide
ggccaaaccucggcuuaccu

SEQ ID NO: 1510 - RNA, 20 nt, Artificial Sequence
  Description of Artificial Sequence: Synthetic oligonucleotide
uucuguaagguuuuuaugug

SEQ ID NO: 1511 - RNA, 20 nt, Artificial Sequence
  Description of Artificial Sequence: Synthetic oligonucleotide
auuucuguaagguuuuuaug

SEQ ID NO: 1512 - RNA, 20 nt, Artificial Sequence
  Description of Artificial Sequence: Synthetic oligonucleotide
ccauuucuguaagguuuuua

SEQ ID NO: 1513 - RNA, 20 nt, Artificial Sequence
  Description of Artificial Sequence: Synthetic oligonucleotide
auccauuucuguaagguuuu

SEQ ID NO: 1514 - RNA, 20 nt, Artificial Sequence
  Description of Artificial Sequence: Synthetic oligonucleotide
cauccauuucuguaagguuu

SEQ ID NO: 1515 - RNA, 20 nt, Artificial Sequence
  Description of Artificial Sequence: Synthetic oligonucleotide
ccauccauuucuguaagguu

SEQ ID NO: 1516 - RNA, 20 nt, Artificial Sequence
  Description of Artificial Sequence: Synthetic oligonucleotide
gccauccauuucuguaaggu

SEQ ID NO: 1517 - RNA, 20 nt, Artificial Sequence
  Description of Artificial Sequence: Synthetic oligonucleotide
agccauccauuucuguaagg

SEQ ID NO: 1518 - RNA, 20 nt, Artificial Sequence
  Description of Artificial Sequence: Synthetic oligonucleotide
cagccauccauuucuguaag

SEQ ID NO: 1519 - RNA, 20 nt, Artificial Sequence
  Description of Artificial Sequence: Synthetic oligonucleotide
ucagccauccauuucuguaa

SEQ ID NO: 1520 - RNA, 20 nt, Artificial Sequence
  Description of Artificial Sequence: Synthetic oligonucleotide
uucagccauccauuucugua

SEQ ID NO: 1521 - RNA, 20 nt, Artificial Sequence
  Description of Artificial Sequence: Synthetic oligonucleotide
cuucagccauccauuucugu

SEQ ID NO: 1522 - RNA, 20 nt, Artificial Sequence
  Description of Artificial Sequence: Synthetic oligonucleotide
acuucagccauccauuucug

SEQ ID NO: 1523 - RNA, 20 nt, Artificial Sequence
  Description of Artificial Sequence: Synthetic oligonucleotide
aacuucagccauccauuucu

SEQ ID NO: 1524 - RNA, 20 nt, Artificial Sequence
  Description of Artificial Sequence: Synthetic oligonucleotide
caacuucagccauccauuuc

SEQ ID NO: 1525 - RNA, 20 nt, Artificial Sequence
  Description of Artificial Sequence: Synthetic oligonucleotide
ucaacuucagccauccauuu

SEQ ID NO: 1526 - RNA, 20 nt, Artificial Sequence
  Description of Artificial Sequence: Synthetic oligonucleotide
aucaacuucagccauccauu

SEQ ID NO: 1527 - RNA, 20 nt, Artificial Sequence
  Description of Artificial Sequence: Synthetic oligonucleotide
caucaacuucagccauccau

SEQ ID NO: 1528 - RNA, 20 nt, Artificial Sequence
  Description of Artificial Sequence: Synthetic oligonucleotide
acaucaacuucagccaucca

SEQ ID NO: 1529 - RNA, 20 nt, Artificial Sequence
  Description of Artificial Sequence: Synthetic oligonucleotide
aacaucaacuucagccaucc

SEQ ID NO: 1530 - RNA, 20 nt, Artificial Sequence
  Description of Artificial Sequence: Synthetic oligonucleotide
gaaaacaucaacuucagcca

SEQ ID NO: 1531 - RNA, 20 nt, Artificial Sequence
  Description of Artificial Sequence: Synthetic oligonucleotide
caggaaaacaucaacuucag

SEQ ID NO: 1532 - RNA, 20 nt, Artificial Sequence
  Description of Artificial Sequence: Synthetic oligonucleotide
uuucaggaaaacaucaacuu

SEQ ID NO: 1533 - RNA, 20 nt, Artificial Sequence
  Description of Artificial Sequence: Synthetic oligonucleotide
cucuuucaggaaaacaucaa

SEQ ID NO: 1534 - RNA, 20 nt, Artificial Sequence
  Description of Artificial Sequence: Synthetic oligonucleotide
uuccucuuucaggaaaacau

SEQ ID NO: 1535 - RNA, 20 nt, Artificial Sequence
  Description of Artificial Sequence: Synthetic oligonucleotide
gccauuccucuuucaggaaa

SEQ ID NO: 1536 - RNA, 20 nt, Artificial Sequence
  Description of Artificial Sequence: Synthetic oligonucleotide
ggccauuccucuuucaggaa

SEQ ID NO: 1537 - RNA, 20 nt, Artificial Sequence
  Description of Artificial Sequence: Synthetic oligonucleotide
aggccauuccucuuucagga

SEQ ID NO: 1538 - RNA, 20 nt, Artificial Sequence
  Description of Artificial Sequence: Synthetic oligonucleotide
caggccauuccucuuucagg

SEQ ID NO: 1539 - RNA, 20 nt, Artificial Sequence
  Description of Artificial Sequence: Synthetic oligonucleotide
gcaggccauuccucuuucag

SEQ ID NO: 1540 - RNA, 20 nt, Artificial Sequence
  Description of Artificial Sequence: Synthetic oligonucleotide
ggcaggccauuccucuuuca

SEQ ID NO: 1541 - RNA, 20 nt, Artificial Sequence
  Description of Artificial Sequence: Synthetic oligonucleotide
gggcaggccauuccucuuuc

SEQ ID NO: 1542 - RNA, 20 nt, Artificial Sequence
  Description of Artificial Sequence: Synthetic oligonucleotide
agggcaggccauuccucuuu

SEQ ID NO: 1543 - RNA, 20 nt, Artificial Sequence
  Description of Artificial Sequence: Synthetic oligonucleotide
cagggcaggccauuccucuu

SEQ ID NO: 1544 - RNA, 20 nt, Artificial Sequence
  Description of Artificial Sequence: Synthetic oligonucleotide
ccagggcaggccauuccucu

SEQ ID NO: 1545 - RNA, 20 nt, Artificial Sequence
  Description of Artificial Sequence: Synthetic oligonucleotide
cccagggcaggccauuccuc

SEQ ID NO: 1546 - RNA, 20 nt, Artificial Sequence
  Description of Artificial Sequence: Synthetic oligonucleotide
ccccagggcaggccauuccu

SEQ ID NO: 1547 - RNA, 20 nt, Artificial Sequence
  Description of Artificial Sequence: Synthetic oligonucleotide
cccccagggcaggccauucc

SEQ ID NO: 1548 - RNA, 20 nt, Artificial Sequence
  Description of Artificial Sequence: Synthetic oligonucleotide
ucccccagggcaggccauuc

SEQ ID NO: 1549 - RNA, 20 nt, Artificial Sequence
  Description of Artificial Sequence: Synthetic oligonucleotide
aucccccagggcaggccauu

SEQ ID NO: 1550 - RNA, 20 nt, Artificial Sequence
  Description of Artificial Sequence: Synthetic oligonucleotide
caucccccagggcaggccau

SEQ ID NO: 1551 - RNA, 20 nt, Artificial Sequence
  Description of Artificial Sequence: Synthetic oligonucleotide
gcaucccccagggcaggcca

SEQ ID NO: 1552 - RNA, 20 nt, Artificial Sequence
  Description of Artificial Sequence: Synthetic oligonucleotide
agcaucccccagggcaggcc

SEQ ID NO: 1553 - RNA, 20 nt, Artificial Sequence
  Description of Artificial Sequence: Synthetic oligonucleotide
cagcaucccccagggcaggc

SEQ ID NO: 1554 - RNA, 20 nt, Artificial Sequence
  Description of Artificial Sequence: Synthetic oligonucleotide
ucagcaucccccagggcagg

SEQ ID NO: 1555 - RNA, 20 nt, Artificial Sequence
  Description of Artificial Sequence: Synthetic oligonucleotide
uucagcaucccccagggcag

SEQ ID NO: 1556 - RNA, 20 nt, Artificial Sequence
  Description of Artificial Sequence: Synthetic oligonucleotide
uuucagcaucccccagggca

SEQ ID NO: 1557 - RNA, 20 nt, Artificial Sequence
  Description of Artificial Sequence: Synthetic oligonucleotide
auuucagcaucccccagggc

SEQ ID NO: 1558 - RNA, 20 nt, Artificial Sequence
  Description of Artificial Sequence: Synthetic oligonucleotide
gauuucagcaucccccaggg

SEQ ID NO: 1559 - RNA, 20 nt, Artificial Sequence
  Description of Artificial Sequence: Synthetic oligonucleotide
ggauuucagcaucccccagg

SEQ ID NO: 1560 - RNA, 20 nt, Artificial Sequence
  Description of Artificial Sequence: Synthetic oligonucleotide
aggauuucagcaucccccag

SEQ ID NO: 1561 - RNA, 20 nt, Artificial Sequence
  Description of Artificial Sequence: Synthetic oligonucleotide
caggauuucagcauccccca

SEQ ID NO: 1562 - RNA, 20 nt, Artificial Sequence
  Description of Artificial Sequence: Synthetic oligonucleotide
ucaggauuucagcauccccc

SEQ ID NO: 1563 - RNA, 20 nt, Artificial Sequence
  Description of Artificial Sequence: Synthetic oligonucleotide
uucaggauuucagcaucccc

SEQ ID NO: 1564 - RNA, 20 nt, Artificial Sequence
  Description of Artificial Sequence: Synthetic oligonucleotide
uuucaggauuucagcauccc

SEQ ID NO: 1565 - RNA, 20 nt, Artificial Sequence
  Description of Artificial Sequence: Synthetic oligonucleotide
uuuucaggauuucagcaucc

SEQ ID NO: 1566 - RNA, 20 nt, Artificial Sequence
  Description of Artificial Sequence: Synthetic oligonucleotide
uuuuucaggauuucagcauc

SEQ ID NO: 1567 - RNA, 20 nt, Artificial Sequence
  Description of Artificial Sequence: Synthetic oligonucleotide
uuuuuucaggauuucagcau

SEQ ID NO: 1568 - RNA, 20 nt, Artificial Sequence
  Description of Artificial Sequence: Synthetic oligonucleotide
guuuuuucaggauuucagca

SEQ ID NO: 1569 - RNA, 20 nt, Artificial Sequence
  Description of Artificial Sequence: Synthetic oligonucleotide
uguuuuuucaggauuucagc

SEQ ID NO: 1570 - RNA, 20 nt, Artificial Sequence
  Description of Artificial Sequence: Synthetic oligonucleotide
cuguuuuuucaggauuucag

SEQ ID NO: 1571 - RNA, 20 nt, Artificial Sequence
  Description of Artificial Sequence: Synthetic oligonucleotide
gcuguuuuuucaggauuuca

SEQ ID NO: 1572 - RNA, 20 nt, Artificial Sequence
  Description of Artificial Sequence: Synthetic oligonucleotide
agcuguuuuuucaggauuuc

SEQ ID NO: 1573 - RNA, 20 nt, Artificial Sequence
  Description of Artificial Sequence: Synthetic oligonucleotide
gagcuguuuuuucaggauuu

SEQ ID NO: 1574 - RNA, 20 nt, Artificial Sequence
  Description of Artificial Sequence: Synthetic oligonucleotide
ugagcuguuuuuucaggauu

SEQ ID NO: 1575 - RNA, 20 nt, Artificial Sequence
  Description of Artificial Sequence: Synthetic oligonucleotide
uugagcuguuuuuucaggau

SEQ ID NO: 1576 - RNA, 20 nt, Artificial Sequence
  Description of Artificial Sequence: Synthetic oligonucleotide
uuugagcuguuuuuucagga

SEQ ID NO: 1577 - RNA, 20 nt, Artificial Sequence
  Description of Artificial Sequence: Synthetic oligonucleotide
guuugagcuguuuuuucagg

SEQ ID NO: 1578 - RNA, 20 nt, Artificial Sequence
  Description of Artificial Sequence: Synthetic oligonucleotide
uuguuugagcuguuuuuuca

SEQ ID NO: 1579 - RNA, 20 nt, Artificial Sequence
  Description of Artificial Sequence: Synthetic oligonucleotide
cauuguuugagcuguuuuuu

SEQ ID NO: 1580 - RNA, 20 nt, Artificial Sequence
  Description of Artificial Sequence: Synthetic oligonucleotide
gcauuguuugagcuguuuuu

SEQ ID NO: 1581 - RNA, 20 nt, Artificial Sequence
  Description of Artificial Sequence: Synthetic oligonucleotide
ugcauuguuugagcuguuuu

SEQ ID NO: 1582 - RNA, 20 nt, Artificial Sequence
  Description of Artificial Sequence: Synthetic oligonucleotide
cugcauuguuugagcuguuu

SEQ ID NO: 1583 - RNA, 20 nt, Artificial Sequence
  Description of Artificial Sequence: Synthetic oligonucleotide
ucugcauuguuugagcuguu

SEQ ID NO: 1584 - RNA, 20 nt, Artificial Sequence
  Description of Artificial Sequence: Synthetic oligonucleotide
cucugcauuguuugagcugu

SEQ ID NO: 1585 - RNA, 20 nt, Artificial Sequence
  Description of Artificial Sequence: Synthetic oligonucleotide
acucugcauuguuugagcug

SEQ ID NO: 1586 - RNA, 20 nt, Artificial Sequence
  Description of Artificial Sequence: Synthetic oligonucleotide
uacucugcauuguuugagcu

SEQ ID NO: 1587 - RNA, 20 nt, Artificial Sequence
  Description of Artificial Sequence: Synthetic oligonucleotide
uuacucugcauuguuugagc

SEQ ID NO: 1588 - RNA, 20 nt, Artificial Sequence
  Description of Artificial Sequence: Synthetic oligonucleotide
cuuacucugcauuguuugag

SEQ ID NO: 1589 - RNA, 20 nt, Artificial Sequence
  Description of Artificial Sequence: Synthetic oligonucleotide
ucuuacucugcauuguuuga

SEQ ID NO: 1590 - RNA, 20 nt, Artificial Sequence
  Description of Artificial Sequence: Synthetic oligonucleotide
aucuuacucugcauuguuug

SEQ ID NO: 1591 - RNA, 20 nt, Artificial Sequence
  Description of Artificial Sequence: Synthetic oligonucleotide
aaucuuacucugcauuguuu

SEQ ID NO: 1592 - RNA, 20 nt, Artificial Sequence
  Description of Artificial Sequence: Synthetic oligonucleotide
caaaucuuacucugcauugu

SEQ ID NO: 1593 - RNA, 20 nt, Artificial Sequence
  Description of Artificial Sequence: Synthetic oligonucleotide
gauacaaaucuuacucugca

SEQ ID NO: 1594 - DNA, 20 bp, Artificial Sequence
  Description of Artificial Sequence: Synthetic oligonucleotide
  Description of Combined DNA/RNA Molecule: Synthetic oligonucleotide
gggucagctgccaatgcuag

SEQ ID NO: 1595 - DNA, 20 bp, Artificial Sequence
  Description of Artificial Sequence: Synthetic oligonucleotide
  Description of Combined DNA/RNA Molecule: Synthetic oligonucleotide
gggucagctgccaatgcuag

SEQ ID NO: 1596 - DNA, 20 bp, Artificial Sequence
  Description of Artificial Sequence: Synthetic oligonucleotide
  Description of Combined DNA/RNA Molecule: Synthetic oligonucleotide
gggucagctgccaatgcuag

SEQ ID NO: 1597 - DNA, 20 bp, Artificial Sequence
  Description of Artificial Sequence: Synthetic oligonucleotide
  Description of Combined DNA/RNA Molecule: Synthetic oligonucleotide
gggucagctgccaatgcuag

SEQ ID NO: 1598 - DNA, 20 bp, Artificial Sequence
  Description of Artificial Sequence: Synthetic oligonucleotide
  Description of Combined DNA/RNA Molecule: Synthetic oligonucleotide
gggucagctgccaatgctag

SEQ ID NO: 1599 - DNA, 20 bp, Artificial Sequence
  Description of Artificial Sequence: Synthetic oligonucleotide
  Description of Combined DNA/RNA Molecule: Synthetic oligonucleotide
gggucagctgccaatgctag

SEQ ID NO: 1600 - DNA, 20 bp, Artificial Sequence
  Description of Artificial Sequence: Synthetic oligonucleotide
  Description of Combined DNA/RNA Molecule: Synthetic oligonucleotide
gggtcagctgccaatgcuag

SEQ ID NO: 1601 - DNA, 20 bp, Artificial Sequence
  Description of Artificial Sequence: Synthetic oligonucleotide
  Description of Combined DNA/RNA Molecule: Synthetic oligonucleotide
gggtcagctgccaatgcuag

SEQ ID NO: 1602 - DNA, 20 bp, Artificial Sequence
  Description of Artificial Sequence: Synthetic oligonucleotide
  Description of Combined DNA/RNA Molecule: Synthetic oligonucleotide
gggucagctgccaatgcuag

SEQ ID NO: 1603 - DNA, 20 bp, Artificial Sequence
  Description of Artificial Sequence: Synthetic oligonucleotide
  Description of Combined DNA/RNA Molecule: Synthetic oligonucleotide
gggucagctgccaatgcuag

SEQ ID NO: 1604 - DNA, 20 bp, Artificial Sequence
  Description of Artificial Sequence: Synthetic oligonucleotide
gggtcagctgccaatgctag

SEQ ID NO: 1605 - DNA, 20 bp, Artificial Sequence
  Description of Artificial Sequence: Synthetic oligonucleotide
gggtcagctgccaatgctag

SEQ ID NO: 1606 - DNA, 20 bp, Artificial Sequence
  Description of Artificial Sequence: Synthetic oligonucleotide
  Description of Combined DNA/RNA Molecule: Synthetic oligonucleotide
gggucagctgccaatgcuag

SEQ ID NO: 1607 - DNA, 20 bp, Artificial Sequence
  Description of Artificial Sequence: Synthetic oligonucleotide
  Description of Combined DNA/RNA Molecule: Synthetic oligonucleotide
gggucagctgccaatgcuag

SEQ ID NO: 1608 - DNA, 20 bp, Artificial Sequence
  Description of Artificial Sequence: Synthetic oligonucleotide
  Description of Combined DNA/RNA Molecule: Synthetic oligonucleotide
gggucagctgccaatgcuag

SEQ ID NO: 1609 - DNA, 20 bp, Artificial Sequence
  Description of Artificial Sequence: Synthetic oligonucleotide
  Description of Combined DNA/RNA Molecule: Synthetic oligonucleotide
gggucagctgccaatgcuag

SEQ ID NO: 1610 - DNA, 20 bp, Artificial Sequence
  Description of Artificial Sequence: Synthetic oligonucleotide
  Description of Combined DNA/RNA Molecule: Synthetic oligonucleotide
gggucagctgccaatgcuag

SEQ ID NO: 1611 - DNA, 20 bp, Artificial Sequence
  Description of Artificial Sequence: Synthetic oligonucleotide
  Description of Combined DNA/RNA Molecule: Synthetic oligonucleotide
gggucagctgccaatgcuag

SEQ ID NO: 1612 - DNA, 20 bp, Artificial Sequence
  Description of Artificial Sequence: Synthetic oligonucleotide
  Description of Combined DNA/RNA Molecule: Synthetic oligonucleotide
gggucagctgccaatgcuag

SEQ ID NO: 1613 - DNA, 20 bp, Artificial Sequence
  Description of Artificial Sequence: Synthetic oligonucleotide
  Description of Combined DNA/RNA Molecule: Synthetic oligonucleotide
gggucagctgccaatgcuag

SEQ ID NO: 1614 - DNA, 20 bp, Artificial Sequence
  Description of Artificial Sequence: Synthetic oligonucleotide
  Description of Combined DNA/RNA Molecule: Synthetic oligonucleotide
gggucagctgccaatgcuag

SEQ ID NO: 1615 - DNA, 20 bp, Artificial Sequence
  Description of Artificial Sequence: Synthetic oligonucleotide
  Description of Combined DNA/RNA Molecule: Synthetic oligonucleotide
gggucagctgccaatgcuag

SEQ ID NO: 1616 - DNA, 20 bp, Artificial Sequence
  Description of Artificial Sequence: Synthetic oligonucleotide
  Description of Combined DNA/RNA Molecule: Synthetic oligonucleotide
gggucagctgccaatgcuag

SEQ ID NO: 1617 - DNA, 20 bp, Artificial Sequence
  Description of Artificial Sequence: Synthetic oligonucleotide
  Description of Combined DNA/RNA Molecule: Synthetic oligonucleotide
gggucagctgccaatgcuag

SEQ ID NO: 1618 - DNA, 20 bp, Artificial Sequence
  Description of Artificial Sequence: Synthetic oligonucleotide
  Description of Combined DNA/RNA Molecule: Synthetic oligonucleotide
gggucagctgccaatgcuag

SEQ ID NO: 1619 - DNA, 20 bp, Artificial Sequence
  Description of Artificial Sequence: Synthetic oligonucleotide
  Description of Combined DNA/RNA Molecule: Synthetic oligonucleotide
gggucagctgccaatgcuag

SEQ ID NO: 1620 - DNA, 20 bp, Artificial Sequence
  Description of Artificial Sequence: Synthetic oligonucleotide
  Description of Combined DNA/RNA Molecule: Synthetic oligonucleotide
gggucagctgccaatgcuag

SEQ ID NO: 1621 - DNA, 20 bp, Artificial Sequence
  Description of Artificial Sequence: Synthetic oligonucleotide
  Description of Combined DNA/RNA Molecule: Synthetic oligonucleotide
gggucagctgccaatgcuag

SEQ ID NO: 1622 - DNA, 20 bp, Artificial Sequence
  Description of Artificial Sequence: Synthetic oligonucleotide
  Description of Combined DNA/RNA Molecule: Synthetic oligonucleotide
gggucagctgccaatgcuag

SEQ ID NO: 1623 - DNA, 20 bp, Artificial Sequence
  Description of Artificial Sequence: Synthetic oligonucleotide
  Description of Combined DNA/RNA Molecule: Synthetic oligonucleotide
gggucagctgccaatgcuag

SEQ ID NO: 1624 - DNA, 20 bp, Artificial Sequence
  Description of Artificial Sequence: Synthetic oligonucleotide
  Description of Combined DNA/RNA Molecule: Synthetic oligonucleotide
gggucagctgccaatgcuag

SEQ ID NO: 1625 - DNA, 20 bp, Artificial Sequence
  Description of Artificial Sequence: Synthetic oligonucleotide
  Description of Combined DNA/RNA Molecule: Synthetic oligonucleotide
gggucagctgccaatgcuag

SEQ ID NO: 1626 - DNA, 20 bp, Artificial Sequence
  Description of Artificial Sequence: Synthetic oligonucleotide
  Description of Combined DNA/RNA Molecule: Synthetic oligonucleotide
gggucagctgccaatgcuag

SEQ ID NO: 1627 - DNA, 20 bp, Artificial Sequence
  Description of Artificial Sequence: Synthetic oligonucleotide
  Description of Combined DNA/RNA Molecule: Synthetic oligonucleotide
gggucagctgccaatgcuag

SEQ ID NO: 1628 - DNA, 20 bp, Artificial Sequence
  Description of Artificial Sequence: Synthetic oligonucleotide
  Description of Combined DNA/RNA Molecule: Synthetic oligonucleotide
gggucagctgccaatgcuag

SEQ ID NO: 1629 - DNA, 20 bp, Artificial Sequence
  Description of Artificial Sequence: Synthetic oligonucleotide
  Description of Combined DNA/RNA Molecule: Synthetic oligonucleotide
gggucagctgccaatgcuag

SEQ ID NO: 1630 - DNA, 20 bp, Artificial Sequence
  Description of Artificial Sequence: Synthetic oligonucleotide
  Description of Combined DNA/RNA Molecule: Synthetic oligonucleotide
gggucagctgccaatgcuag

SEQ ID NO: 1631 - DNA, 20 bp, Artificial Sequence
  Description of Artificial Sequence: Synthetic oligonucleotide
  Description of Combined DNA/RNA Molecule: Synthetic oligonucleotide
gggucagctgccaatgcuag

SEQ ID NO: 1632 - DNA, 20 bp, Artificial Sequence
  Description of Artificial Sequence: Synthetic oligonucleotide
  Description of Combined DNA/RNA Molecule: Synthetic oligonucleotide
gggucagctgccaatgcuag

SEQ ID NO: 1633 - DNA, 20 bp, Artificial Sequence
  Description of Artificial Sequence: Synthetic oligonucleotide
  Description of Combined DNA/RNA Molecule: Synthetic oligonucleotide
gggucagctgccaatgcuag

SEQ ID NO: 1634 - RNA, 20 nt, Artificial Sequence
  Description of Artificial Sequence: Synthetic oligonucleotide
cuagcauuggcagcugaccc

SEQ ID NO: 1635 - DNA, 20 bp, Artificial Sequence
  Description of Artificial Sequence: Synthetic oligonucleotide
gggtcagctgccaatgctag

SEQ ID NO: 1636 - DNA, 20 bp, Artificial Sequence
  Description of Artificial Sequence: Synthetic oligonucleotide
  Description of Combined DNA/RNA Molecule: Synthetic oligonucleotide
gggucagctgccaatgcuag

SEQ ID NO: 1637 - DNA, 20 bp, Artificial Sequence
  Description of Artificial Sequence: Synthetic oligonucleotide
  Description of Combined DNA/RNA Molecule: Synthetic oligonucleotide
gggucagctgccaatgcuag

SEQ ID NO: 1638 - DNA, 20 bp, Artificial Sequence
  Description of Artificial Sequence: Synthetic oligonucleotide
gggtcagctgccaatgctag

SEQ ID NO: 1639 - DNA, 20 bp, Artificial Sequence
  Description of Artificial Sequence: Synthetic oligonucleotide
gggtcagctgccaatgctag

SEQ ID NO: 1640 - DNA, 20 bp, Artificial Sequence
  Description of Artificial Sequence: Synthetic oligonucleotide
gggtcagctgccaatgctag

SEQ ID NO: 1641 - DNA, 20 bp, Artificial Sequence
  Description of Artificial Sequence: Synthetic oligonucleotide
gggtcagctgccaatgctag

SEQ ID NO: 1642 - DNA, 20 bp, Artificial Sequence
  Description of Artificial Sequence: Synthetic oligonucleotide
gggtcagctgccaatgctag

SEQ ID NO: 1643 - DNA, 20 bp, Artificial Sequence
  Description of Artificial Sequence: Synthetic oligonucleotide
gggtcagctgccaatgctag

SEQ ID NO: 1644 - DNA, 20 bp, Artificial Sequence
  Description of Artificial Sequence: Synthetic oligonucleotide
gggtcagctgccaatgctag

SEQ ID NO: 1645 - DNA, 20 bp, Artificial Sequence
  Description of Artificial Sequence: Synthetic oligonucleotide
gggtcagctgccaatgctag

SEQ ID NO: 1646 - DNA, 20 bp, Artificial Sequence
  Description of Artificial Sequence: Synthetic oligonucleotide
gggtcagctgccaatgctag

SEQ ID NO: 1647 - DNA, 20 bp, Artificial Sequence
  Description of Artificial Sequence: Synthetic oligonucleotide
gggtcagctgccaatgctag

SEQ ID NO: 1648 - DNA, 20 bp, Artificial Sequence
  Description of Artificial Sequence: Synthetic oligonucleotide
gggtcagctgccaatgctag

SEQ ID NO: 1649 - DNA, 20 bp, Artificial Sequence
  Description of Artificial Sequence: Synthetic oligonucleotide
gggtcagctgccaatgctag

SEQ ID NO: 1650 - DNA, 20 bp, Artificial Sequence
  Description of Artificial Sequence: Synthetic oligonucleotide
gggtcagctgccaatgctag

SEQ ID NO: 1651 - DNA, 20 bp, Artificial Sequence
  Description of Artificial Sequence: Synthetic oligonucleotide
gggtcagctgccaatgctag

SEQ ID NO: 1652 - DNA, 20 bp, Artificial Sequence
  Description of Artificial Sequence: Synthetic oligonucleotide
gggtcagctgccaatgctag

SEQ ID NO: 1653 - DNA, 20 bp, Artificial Sequence
  Description of Artificial Sequence: Synthetic oligonucleotide
gggtcagctgccaatgctag

SEQ ID NO: 1654 - DNA, 20 bp, Artificial Sequence
  Description of Artificial Sequence: Synthetic oligonucleotide
gggtcagctgccaatgctag

SEQ ID NO: 1655 - DNA, 20 bp, Artificial Sequence
  Description of Artificial Sequence: Synthetic oligonucleotide
gggtcagctgccaatgctag

SEQ ID NO: 1656 - DNA, 20 bp, Artificial Sequence
  Description of Artificial Sequence: Synthetic oligonucleotide
gggtcagctgccaatgctag

SEQ ID NO: 1657 - DNA, 20 bp, Artificial Sequence
  Description of Artificial Sequence: Synthetic oligonucleotide
gggtcagctgccaatgctag

SEQ ID NO: 1658 - DNA, 20 bp, Artificial Sequence
  Description of Artificial Sequence: Synthetic oligonucleotide
gggtcagctgccaatgctag

SEQ ID NO: 1659 - DNA, 20 bp, Artificial Sequence
  Description of Artificial Sequence: Synthetic oligonucleotide
gggtcagctgccaatgctag

SEQ ID NO: 1660 - DNA, 20 bp, Artificial Sequence
  Description of Artificial Sequence: Synthetic oligonucleotide
  Description of Combined DNA/RNA Molecule: Synthetic oligonucleotide
uagcgcccacctcaccccuc

SEQ ID NO: 1661 - DNA, 20 bp, Artificial Sequence
  Description of Artificial Sequence: Synthetic oligonucleotide
  Description of Combined DNA/RNA Molecule: Synthetic oligonucleotide
uuagcgcccacctcaccccu

SEQ ID NO: 1662 - DNA, 20 bp, Artificial Sequence
  Description of Artificial Sequence: Synthetic oligonucleotide
  Description of Combined DNA/RNA Molecule: Synthetic oligonucleotide
cuuagcgcccacctcacccc

SEQ ID NO: 1663 - DNA, 20 bp, Artificial Sequence
  Description of Artificial Sequence: Synthetic oligonucleotide
accccgtcctggaaaccagg

SEQ ID NO: 1664 - DNA, 20 bp, Artificial Sequence
  Description of Artificial Sequence: Synthetic oligonucleotide
ccccgtcctggaaaccagga

SEQ ID NO: 1665 - DNA, 20 bp, Artificial Sequence
  Description of Artificial Sequence: Synthetic oligonucleotide
  Description of Combined DNA/RNA Molecule: Synthetic oligonucleotide
gcuuagcgcccacctcaccc

SEQ ID NO: 1666 - RNA, 20 nt, Artificial Sequence
  Description of Artificial Sequence: Synthetic oligonucleotide
ggcuuagcgcccaccucacc

SEQ ID NO: 1667 - DNA, 20 bp, Artificial Sequence
  Description of Artificial Sequence: Synthetic oligonucleotide
  Description of Combined DNA/RNA Molecule: Synthetic oligonucleotide
cccgucctggaaaccaggag

SEQ ID NO: 1668 - DNA, 20 bp, Artificial Sequence
  Description of Artificial Sequence: Synthetic oligonucleotide
  Description of Combined DNA/RNA Molecule: Synthetic oligonucleotide
ugaaccccgtcctggaaacc

SEQ ID NO: 1669 - DNA, 20 bp, Artificial Sequence
  Description of Artificial Sequence: Synthetic oligonucleotide
  Description of Combined DNA/RNA Molecule: Synthetic oligonucleotide
uuucccctccctcatcaaca

SEQ ID NO: 1670 - DNA, 20 bp, Artificial Sequence
  Description of Artificial Sequence: Synthetic oligonucleotide
  Description of Combined DNA/RNA Molecule: Synthetic oligonucleotide
agcuccagtccctgaaggug

SEQ ID NO: 1671 - DNA, 20 bp, Artificial Sequence
  Description of Artificial Sequence: Synthetic oligonucleotide
  Description of Combined DNA/RNA Molecule: Synthetic oligonucleotide
aggcutagcgcccaccucac

SEQ ID NO: 1672 - DNA, 20 bp, Artificial Sequence
  Description of Artificial Sequence: Synthetic oligonucleotide
  Description of Combined DNA/RNA Molecule: Synthetic oligonucleotide
guuucccctccctcaucaac

SEQ ID NO: 1673 - DNA, 20 bp, Artificial Sequence
  Description of Artificial Sequence: Synthetic oligonucleotide
aaccccgtcctggaaaccag

SEQ ID NO: 1674 - DNA, 20 bp, Artificial Sequence
  Description of Artificial Sequence: Synthetic oligonucleotide
gaaccccgtcctggaaacca

SEQ ID NO: 1675 - DNA, 20 bp, Artificial Sequence
  Description of Artificial Sequence: Synthetic oligonucleotide
  Description of Combined DNA/RNA Molecule: Synthetic oligonucleotide
gcuccagtccctgaaggugu

SEQ ID NO: 1676 - DNA, 20 bp, Artificial Sequence
  Description of Artificial Sequence: Synthetic oligonucleotide
  Description of Combined DNA/RNA Molecule: Synthetic oligonucleotide
uugaaccccgtcctggaaac

SEQ ID NO: 1677 - DNA, 20 bp, Artificial Sequence
  Description of Artificial Sequence: Synthetic oligonucleotide
  Description of Combined DNA/RNA Molecule: Synthetic oligonucleotide
uucccctccctcatcaacaa

SEQ ID NO: 1678 - DNA, 20 bp, Artificial Sequence
  Description of Artificial Sequence: Synthetic oligonucleotide
  Description of Combined DNA/RNA Molecule: Synthetic oligonucleotide
ccgucctggaaaccaggagu

SEQ ID NO: 1679 - DNA, 20 bp, Artificial Sequence
  Description of Artificial Sequence: Synthetic oligonucleotide
gcagctccagtccctgaagg

SEQ ID NO: 1680 - DNA, 20 bp, Artificial Sequence
  Description of Artificial Sequence: Synthetic oligonucleotide
  Description of Combined DNA/RNA Molecule: Synthetic oligonucleotide
ugccaggctggttatgacuc

SEQ ID NO: 1681 - DNA, 20 bp, Artificial Sequence
  Description of Artificial Sequence: Synthetic oligonucleotide
  Description of Combined DNA/RNA Molecule: Synthetic oligonucleotide
cgucctggaaaccaggagug

SEQ ID NO: 1682 - DNA, 20 bp, Artificial Sequence
  Description of Artificial Sequence: Synthetic oligonucleotide
  Description of Combined DNA/RNA Molecule: Synthetic oligonucleotide
cagcuccagtccctgaaggu

SEQ ID NO: 1683 - DNA, 20 bp, Artificial Sequence
  Description of Artificial Sequence: Synthetic oligonucleotide
  Description of Combined DNA/RNA Molecule: Synthetic oligonucleotide
cugccaggctggttaugacu

SEQ ID NO: 1684 - RNA, 20 nt, Artificial Sequence
  Description of Artificial Sequence: Synthetic oligonucleotide
uccuggaaaccaggagugcc

SEQ ID NO: 1685 - DNA, 20 bp, Artificial Sequence
  Description of Artificial Sequence: Synthetic oligonucleotide
  Description of Combined DNA/RNA Molecule: Synthetic oligonucleotide
aaggcttagcgcccaccuca

SEQ ID NO: 1686 - DNA, 20 bp, Artificial Sequence
  Description of Artificial Sequence: Synthetic oligonucleotide
  Description of Combined DNA/RNA Molecule: Synthetic oligonucleotide
ccaggctggttatgacucag

SEQ ID NO: 1687 - RNA, 20 nt, Artificial Sequence
  Description of Artificial Sequence: Synthetic oligonucleotide
ccuggaaaccaggagugcca

SEQ ID NO: 1688 - DNA, 20 bp, Artificial Sequence
  Description of Artificial Sequence: Synthetic oligonucleotide
  Description of Combined DNA/RNA Molecule: Synthetic oligonucleotide
gccaggctggttatgacuca

SEQ ID NO: 1689 - DNA, 20 bp, Artificial Sequence
  Description of Artificial Sequence: Synthetic oligonucleotide
  Description of Combined DNA/RNA Molecule: Synthetic oligonucleotide
aaaggcttagcgcccaccuc

SEQ ID NO: 1690 - DNA, 20 bp, Artificial Sequence
  Description of Artificial Sequence: Synthetic oligonucleotide
  Description of Combined DNA/RNA Molecule: Synthetic oligonucleotide
ggauugggagttactugcca

SEQ ID NO: 1691 - RNA, 20 nt, Artificial Sequence
  Description of Artificial Sequence: Synthetic oligonucleotide
guccuggaaaccaggagugc

SEQ ID NO: 1692 - DNA, 20 bp, Artificial Sequence
  Description of Artificial Sequence: Synthetic oligonucleotide
  Description of Combined DNA/RNA Molecule: Synthetic oligonucleotide
caggctggttatgacucaga

SEQ ID NO: 1693 - DNA, 20 bp, Artificial Sequence
  Description of Artificial Sequence: Synthetic oligonucleotide
  Description of Combined DNA/RNA Molecule: Synthetic oligonucleotide
gggagttacttgccaacuug

SEQ ID NO: 1694 - DNA, 20 bp, Artificial Sequence
  Description of Artificial Sequence: Synthetic oligonucleotide
  Description of Combined DNA/RNA Molecule: Synthetic oligonucleotide
ugggagttacttgccaacuu

SEQ ID NO: 1695 - DNA, 20 bp, Artificial Sequence
  Description of Artificial Sequence: Synthetic oligonucleotide
  Description of Combined DNA/RNA Molecule: Synthetic oligonucleotide
uugggagttacttgccaacu

SEQ ID NO: 1696 - DNA, 20 bp, Artificial Sequence
  Description of Artificial Sequence: Synthetic oligonucleotide
  Description of Combined DNA/RNA Molecule: Synthetic oligonucleotide
auuucctcaacactcagccu

SEQ ID NO: 1697 - DNA, 20 bp, Artificial Sequence
  Description of Artificial Sequence: Synthetic oligonucleotide
  Description of Combined DNA/RNA Molecule: Synthetic oligonucleotide
ccccuccctcatcaacaaaa

SEQ ID NO: 1698 - DNA, 20 bp, Artificial Sequence
  Description of Artificial Sequence: Synthetic oligonucleotide
  Description of Combined DNA/RNA Molecule: Synthetic oligonucleotide
acauutccacttgccaguua

SEQ ID NO: 1699 - DNA, 20 bp, Artificial Sequence
  Description of Artificial Sequence: Synthetic oligonucleotide
  Description of Combined DNA/RNA Molecule: Synthetic oligonucleotide
aaaaggcttagcgcccaccu

SEQ ID NO: 1700 - DNA, 20 bp, Artificial Sequence
  Description of Artificial Sequence: Synthetic oligonucleotide
  Description of Combined DNA/RNA Molecule: Synthetic oligonucleotide
accugtctgaggcaaacgaa

SEQ ID NO: 1701 - DNA, 20 bp, Artificial Sequence
  Description of Artificial Sequence: Synthetic oligonucleotide
  Description of Combined DNA/RNA Molecule: Synthetic oligonucleotide
auugggagttacttgccaac

SEQ ID NO: 1702 - RNA, 20 nt, Artificial Sequence
  Description of Artificial Sequence: Synthetic oligonucleotide
ucaacaaaagcccacccucu

SEQ ID NO: 1703 - DNA, 20 bp, Artificial Sequence
  Description of Artificial Sequence: Synthetic oligonucleotide
  Description of Combined DNA/RNA Molecule: Synthetic oligonucleotide
cuaagatgctagcttggcca

SEQ ID NO: 1704 - DNA, 20 bp, Artificial Sequence
  Description of Artificial Sequence: Synthetic oligonucleotide
gggtcagctgccaatgctag

SEQ ID NO: 1705 - DNA, 20 bp, Artificial Sequence
  Description of Artificial Sequence: Synthetic oligonucleotide
gggtcagctgccaatgctag

SEQ ID NO: 1706 - DNA, 20 bp, Artificial Sequence
  Description of Artificial Sequence: Synthetic oligonucleotide
gggtcagctgccaatgctag

SEQ ID NO: 1707 - DNA, 20 bp, Artificial Sequence
  Description of Artificial Sequence: Synthetic oligonucleotide
gggtcagctgccaatgctag

SEQ ID NO: 1708 - DNA, 20 bp, Artificial Sequence
  Description of Artificial Sequence: Synthetic oligonucleotide
gggtcagctgccaatgctag

SEQ ID NO: 1709 - RNA, 20 nt, Artificial Sequence
  Description of Artificial Sequence: Synthetic oligonucleotide
ucaaggaagauggcauuucu

SEQ ID NO: 1710 - RNA, 20 nt, Artificial Sequence
  Description of Artificial Sequence: Synthetic oligonucleotide
ucaaggaagauggcauuucu

SEQ ID NO: 1711 - RNA, 20 nt, Artificial Sequence
  Description of Artificial Sequence: Synthetic oligonucleotide
ucaaggaagauggcauuucu

SEQ ID NO: 1712 - RNA, 20 nt, Artificial Sequence
  Description of Artificial Sequence: Synthetic oligonucleotide
ucaaggaagauggcauuucu

SEQ ID NO: 1713 - DNA, 20 bp, Artificial Sequence
  Description of Artificial Sequence: Synthetic oligonucleotide
attaataaattgtcatcacc

SEQ ID NO: 1714 - DNA, 20 bp, Artificial Sequence
  Description of Artificial Sequence: Synthetic oligonucleotide
attaataaattgtcatcacc

SEQ ID NO: 1715 - DNA, 20 bp, Artificial Sequence
  Description of Artificial Sequence: Synthetic oligonucleotide
attaataaattgtcatcacc

SEQ ID NO: 1716 - RNA, 20 nt, Artificial Sequence
  Description of Artificial Sequence: Synthetic oligonucleotide
ggugaugacaauuuauuaau

SEQ ID NO: 1717 - RNA, 20 nt, Artificial Sequence
  Description of Artificial Sequence: Synthetic oligonucleotide
ggugauggcaauuuauuaau

SEQ ID NO: 1718 - RNA, 25 nt, Artificial Sequence
  Description of Artificial Sequence: Synthetic oligonucleotide
uuuggaagucugcgcccuugugccc

SEQ ID NO: 1719 - RNA, 25 nt, Artificial Sequence
  Description of Artificial Sequence: Synthetic oligonucleotide
uuuggaagucugugcccuugugccc

SEQ ID NO: 1720 - DNA, 20 bp, Artificial Sequence
  Description of Artificial Sequence: Synthetic oligonucleotide
gggcacaagggcacagactt

SEQ ID NO: 1721 - DNA, 20 bp, Artificial Sequence
  Description of Artificial Sequence: Synthetic oligonucleotide
ggcacaagggcacagacttc

SEQ ID NO: 1722 - DNA, 20 bp, Artificial Sequence
  Description of Artificial Sequence: Synthetic oligonucleotide
gcacaagggcacagacttcc

SEQ ID NO: 1723 - DNA, 20 bp, Artificial Sequence
  Description of Artificial Sequence: Synthetic oligonucleotide
cacaagggcacagacttcca

SEQ ID NO: 1724 - DNA, 20 bp, Artificial Sequence
  Description of Artificial Sequence: Synthetic oligonucleotide
acaagggcacagacttccaa

SEQ ID NO: 1725 - DNA, 20 bp, Artificial Sequence
  Description of Artificial Sequence: Synthetic oligonucleotide
caagggcacagacttccaaa

SEQ ID NO: 1726 - DNA, 20 bp, Artificial Sequence
  Description of Artificial Sequence: Synthetic oligonucleotide
gggcacaagggcacagactt

SEQ ID NO: 1727 - DNA, 20 bp, Artificial Sequence
  Description of Artificial Sequence: Synthetic oligonucleotide
ggcacaagggcacagacttc

SEQ ID NO: 1728 - DNA, 20 bp, Artificial Sequence
  Description of Artificial Sequence: Synthetic oligonucleotide
gcacaagggcacagacttcc

SEQ ID NO: 1729 - DNA, 20 bp, Artificial Sequence
  Description of Artificial Sequence: Synthetic oligonucleotide
cacaagggcacagacttcca

SEQ ID NO: 1730 - DNA, 20 bp, Artificial Sequence
  Description of Artificial Sequence: Synthetic oligonucleotide
acaagggcacagacttccaa

SEQ ID NO: 1731 - DNA, 20 bp, Artificial Sequence
  Description of Artificial Sequence: Synthetic oligonucleotide
caagggcacagacttccaaa

SEQ ID NO: 1732 - RNA, 20 nt, Artificial Sequence
  Description of Artificial Sequence: Synthetic oligonucleotide
gggcacaagggcacagacuu

SEQ ID NO: 1733 - RNA, 20 nt, Artificial Sequence
  Description of Artificial Sequence: Synthetic oligonucleotide
ggcacaagggcacagacuuc

SEQ ID NO: 1734 - RNA, 20 nt, Artificial Sequence
  Description of Artificial Sequence: Synthetic oligonucleotide
gcacaagggcacagacuucc

SEQ ID NO: 1735 - RNA, 20 nt, Artificial Sequence
  Description of Artificial Sequence: Synthetic oligonucleotide
cacaagggcacagacuucca

SEQ ID NO: 1736 - DNA, 20 bp, Artificial Sequence
  Description of Artificial Sequence: Synthetic oligonucleotide
  Description of Combined DNA/RNA Molecule: Synthetic oligonucleotide
acaagggcacagactuccaa

SEQ ID NO: 1737 - DNA, 20 bp, Artificial Sequence
  Description of Artificial Sequence: Synthetic oligonucleotide
caagggcacagacttccaaa

SEQ ID NO: 1738 - RNA, 20 nt, Artificial Sequence
  Description of Artificial Sequence: Synthetic oligonucleotide
gcacaagggcacagacuucc

SEQ ID NO: 1739 - RNA, 20 nt, Artificial Sequence
  Description of Artificial Sequence: Synthetic oligonucleotide
cacaagggcacagacuucca

SEQ ID NO: 1740 - RNA, 20 nt, Artificial Sequence
  Description of Artificial Sequence: Synthetic oligonucleotide
acaagggcacagacuuccaa

SEQ ID NO: 1741 - RNA, 20 nt, Artificial Sequence
  Description of Artificial Sequence: Synthetic oligonucleotide
caagggcacagacuuccaaa

SEQ ID NO: 1742 - RNA, 20 nt, Artificial Sequence
  Description of Artificial Sequence: Synthetic oligonucleotide
gcacaagggcacagacuucc

SEQ ID NO: 1743 - RNA, 20 nt, Artificial Sequence
  Description of Artificial Sequence: Synthetic oligonucleotide
cacaagggcacagacuucca

SEQ ID NO: 1744 - RNA, 20 nt, Artificial Sequence
  Description of Artificial Sequence: Synthetic oligonucleotide
acaagggcacagacuuccaa

SEQ ID NO: 1745 - RNA, 20 nt, Artificial Sequence
  Description of Artificial Sequence: Synthetic oligonucleotide
caagggcacagacuuccaaa

SEQ ID NO: 1746 - RNA, 20 nt, Artificial Sequence
  Description of Artificial Sequence: Synthetic oligonucleotide
gggcacaagggcacagacuu

SEQ ID NO: 1747 - RNA, 20 nt, Artificial Sequence
  Description of Artificial Sequence: Synthetic oligonucleotide
ggcacaagggcacagacuuc

SEQ ID NO: 1748 - RNA, 20 nt, Artificial Sequence
  Description of Artificial Sequence: Synthetic oligonucleotide
gcacaagggcacagacuucc

SEQ ID NO: 1749 - RNA, 20 nt, Artificial Sequence
  Description of Artificial Sequence: Synthetic oligonucleotide
cacaagggcacagacuucca

SEQ ID NO: 1750 - DNA, 20 bp, Artificial Sequence
  Description of Artificial Sequence: Synthetic oligonucleotide
  Description of Combined DNA/RNA Molecule: Synthetic oligonucleotide
acaagggcacagactuccaa

SEQ ID NO: 1751 - DNA, 20 bp, Artificial Sequence
  Description of Artificial Sequence: Synthetic oligonucleotide
caagggcacagacttccaaa

SEQ ID NO: 1752 - DNA, 20 bp, Artificial Sequence
  Description of Artificial Sequence: Synthetic oligonucleotide
gggcacaagggcacagactt

SEQ ID NO: 1753 - DNA, 20 bp, Artificial Sequence
  Description of Artificial Sequence: Synthetic oligonucleotide
ggcacaagggcacagacttc

SEQ ID NO: 1754 - DNA, 20 bp, Artificial Sequence
  Description of Artificial Sequence: Synthetic oligonucleotide
gcacaagggcacagacttcc

SEQ ID NO: 1755 - DNA, 20 bp, Artificial Sequence
  Description of Artificial Sequence: Synthetic oligonucleotide
cacaagggcacagacttcca

SEQ ID NO: 1756 - DNA, 20 bp, Artificial Sequence
  Description of Artificial Sequence: Synthetic oligonucleotide
acaagggcacagacttccaa

SEQ ID NO: 1757 - DNA, 20 bp, Artificial Sequence
  Description of Artificial Sequence: Synthetic oligonucleotide
caagggcacagacttccaaa

SEQ ID NO: 1758 - RNA, 25 nt, Artificial Sequence
  Description of Artificial Sequence: Synthetic oligonucleotide
uuuggaagucugcgcccuugugccc

SEQ ID NO: 1759 - RNA, 25 nt, Artificial Sequence
  Description of Artificial Sequence: Synthetic oligonucleotide
uuuggaagucugugcccuugugccc

SEQ ID NO: 1760 - DNA, 20 bp, Artificial Sequence
  Description of Artificial Sequence: Synthetic oligonucleotide
gagcagctgcaacctggcaa

SEQ ID NO: 1761 - DNA, 20 bp, Artificial Sequence
  Description of Artificial Sequence: Synthetic oligonucleotide
gggccaacagccagcctgca

SEQ ID NO: 1762 - RNA, 25 nt, Artificial Sequence
  Description of Artificial Sequence: Synthetic oligonucleotide
gguuguugccagguuacagcugcuc

SEQ ID NO: 1763 - RNA, 25 nt, Artificial Sequence
  Description of Artificial Sequence: Synthetic oligonucleotide
gguuguugccagguugcagcugcuc

SEQ ID NO: 1764 - DNA, 20 bp, Artificial Sequence
  Description of Artificial Sequence: Synthetic oligonucleotide
gagcagctgcaacctggcaa

SEQ ID NO: 1765 - DNA, 20 bp, Artificial Sequence
  Description of Artificial Sequence: Synthetic oligonucleotide
agcagctgcaacctggcaac

SEQ ID NO: 1766 - DNA, 20 bp, Artificial Sequence
  Description of Artificial Sequence: Synthetic oligonucleotide
gcagctgcaacctggcaaca

SEQ ID NO: 1767 - DNA, 20 bp, Artificial Sequence
  Description of Artificial Sequence: Synthetic oligonucleotide
cagctgcaacctggcaacaa

SEQ ID NO: 1768 - DNA, 20 bp, Artificial Sequence
  Description of Artificial Sequence: Synthetic oligonucleotide
agctgcaacctggcaacaac

SEQ ID NO: 1769 - DNA, 20 bp, Artificial Sequence
  Description of Artificial Sequence: Synthetic oligonucleotide
gctgcaacctggcaacaacc

SEQ ID NO: 1770 - RNA, 25 nt, Artificial Sequence
  Description of Artificial Sequence: Synthetic oligonucleotide
ccuccugcaggcuggguguuggccc

SEQ ID NO: 1771 - RNA, 25 nt, Artificial Sequence
  Description of Artificial Sequence: Synthetic oligonucleotide
ccuccugcaggcuggcuguuggccc

SEQ ID NO: 1772 - DNA, 20 bp, Artificial Sequence
  Description of Artificial Sequence: Synthetic oligonucleotide
gggccaacagccagcctgca

SEQ ID NO: 1773 - DNA, 20 bp, Artificial Sequence
  Description of Artificial Sequence: Synthetic oligonucleotide
ggccaacagccagcctgcag

SEQ ID NO: 1774 - DNA, 20 bp, Artificial Sequence
  Description of Artificial Sequence: Synthetic oligonucleotide
gccaacagccagcctgcagg

SEQ ID NO: 1775 - DNA, 20 bp, Artificial Sequence
  Description of Artificial Sequence: Synthetic oligonucleotide
ccaacagccagcctgcagga

SEQ ID NO: 1776 - DNA, 20 bp, Artificial Sequence
  Description of Artificial Sequence: Synthetic oligonucleotide
caacagccagcctgcaggag

SEQ ID NO: 1777 - DNA, 20 bp, Artificial Sequence
  Description of Artificial Sequence: Synthetic oligonucleotide
aacagccagcctgcaggagg

SEQ ID NO: 1778 - DNA, 21 bp, Artificial Sequence
  Description of Artificial Sequence: Synthetic oligonucleotide
  Description of Combined DNA/RNA Molecule: Synthetic oligonucleotide
ggccuuucacuacuccuactt

SEQ ID NO: 1779 - DNA, 21 bp, Artificial Sequence
  Description of Artificial Sequence: Synthetic oligonucleotide
  Description of Combined DNA/RNA Molecule: Synthetic oligonucleotide
guaggaguagugaaaggcctt

SEQ ID NO: 1780 - DNA, 20 bp, Artificial Sequence
  Description of Artificial Sequence: Synthetic oligonucleotide
gtaggagtagtgaaaggcca

SEQ ID NO: 1781 - DNA, 20 bp, Artificial Sequence
  Description of Artificial Sequence: Synthetic oligonucleotide
gcagggcacaagggcacaga

SEQ ID NO: 1782 - DNA, 20 bp, Artificial Sequence
  Description of Artificial Sequence: Synthetic oligonucleotide
cagggcacaagggcacagac

SEQ ID NO: 1783 - DNA, 20 bp, Artificial Sequence
  Description of Artificial Sequence: Synthetic oligonucleotide
agggcacaagggcacagact

SEQ ID NO: 1784 - DNA, 20 bp, Artificial Sequence
  Description of Artificial Sequence: Synthetic oligonucleotide
aagggcacagacttccaaag

SEQ ID NO: 1785 - DNA, 20 bp, Artificial Sequence
  Description of Artificial Sequence: Synthetic oligonucleotide
agggcacagacttccaaagg

SEQ ID NO: 1786 - DNA, 20 bp, Artificial Sequence
  Description of Artificial Sequence: Synthetic oligonucleotide
gggcacagacttccaaaggc

SEQ ID NO: 1787 - DNA, 20 bp, Artificial Sequence
  Description of Artificial Sequence: Synthetic oligonucleotide
gagcagctgcaacctggcaa

SEQ ID NO: 1788 - DNA, 20 bp, Artificial Sequence
  Description of Artificial Sequence: Synthetic oligonucleotide
agcagctgcaacctggcaac

SEQ ID NO: 1789 - DNA, 20 bp, Artificial Sequence
  Description of Artificial Sequence: Synthetic oligonucleotide
gcagctgcaacctggcaaca

SEQ ID NO: 1790 - DNA, 20 bp, Artificial Sequence
  Description of Artificial Sequence: Synthetic oligonucleotide
cagctgcaacctggcaacaa

SEQ ID NO: 1791 - DNA, 20 bp, Artificial Sequence
  Description of Artificial Sequence: Synthetic oligonucleotide
agctgcaacctggcaacaac

SEQ ID NO: 1792 - DNA, 20 bp, Artificial Sequence
  Description of Artificial Sequence: Synthetic oligonucleotide
gctgcaacctggcaacaacc

SEQ ID NO: 1793 - DNA, 20 bp, Artificial Sequence
  Description of Artificial Sequence: Synthetic oligonucleotide
gagcagctgcaacctggcaa

SEQ ID NO: 1794 - DNA, 20 bp, Artificial Sequence
  Description of Artificial Sequence: Synthetic oligonucleotide
agcagctgcaacctggcaac

SEQ ID NO: 1795 - DNA, 20 bp, Artificial Sequence
  Description of Artificial Sequence: Synthetic oligonucleotide
gcagctgcaacctggcaaca

SEQ ID NO: 1796 - DNA, 20 bp, Artificial Sequence
  Description of Artificial Sequence: Synthetic oligonucleotide
  Description of Combined DNA/RNA Molecule: Synthetic oligonucleotide
cagcugcaacctggcaacaa

SEQ ID NO: 1797 - DNA, 20 bp, Artificial Sequence
  Description of Artificial Sequence: Synthetic oligonucleotide
  Description of Combined DNA/RNA Molecule: Synthetic oligonucleotide
agcugcaacctggcaacaac

SEQ ID NO: 1798 - DNA, 20 bp, Artificial Sequence
  Description of Artificial Sequence: Synthetic oligonucleotide
  Description of Combined DNA/RNA Molecule: Synthetic oligonucleotide
gcugcaacctggcaacaacc

SEQ ID NO: 1799 - DNA, 20 bp, Artificial Sequence
  Description of Artificial Sequence: Synthetic oligonucleotide
gagcagctgcaacctggcaa

SEQ ID NO: 1800 - DNA, 20 bp, Artificial Sequence
  Description of Artificial Sequence: Synthetic oligonucleotide
agcagctgcaacctggcaac

SEQ ID NO: 1801 - DNA, 20 bp, Artificial Sequence
  Description of Artificial Sequence: Synthetic oligonucleotide
gcagctgcaacctggcaaca

SEQ ID NO: 1802 - DNA, 20 bp, Artificial Sequence
  Description of Artificial Sequence: Synthetic oligonucleotide
  Description of Combined DNA/RNA Molecule: Synthetic oligonucleotide
cagcugcaacctggcaacaa

SEQ ID NO: 1803 - DNA, 20 bp, Artificial Sequence
  Description of Artificial Sequence: Synthetic oligonucleotide
  Description of Combined DNA/RNA Molecule: Synthetic oligonucleotide
agcugcaacctggcaacaac

SEQ ID NO: 1804 - DNA, 20 bp, Artificial Sequence
  Description of Artificial Sequence: Synthetic oligonucleotide
  Description of Combined DNA/RNA Molecule: Synthetic oligonucleotide
gcugcaacctggcaacaacc

SEQ ID NO: 1805 - DNA, 20 bp, Artificial Sequence
  Description of Artificial Sequence: Synthetic oligonucleotide
  Description of Combined DNA/RNA Molecule: Synthetic oligonucleotide
gagcagctgcaaccuggcaa

SEQ ID NO: 1806 - DNA, 20 bp, Artificial Sequence
  Description of Artificial Sequence: Synthetic oligonucleotide
  Description of Combined DNA/RNA Molecule: Synthetic oligonucleotide
gagcagctgcaaccuggcaa

SEQ ID NO: 1807 - DNA, 20 bp, Artificial Sequence
  Description of Artificial Sequence: Synthetic oligonucleotide
agcagctgcaacctggcaac

SEQ ID NO: 1808 - DNA, 20 bp, Artificial Sequence
  Description of Artificial Sequence: Synthetic oligonucleotide
agcagctgcaacctggcaac

SEQ ID NO: 1809 - DNA, 20 bp, Artificial Sequence
  Description of Artificial Sequence: Synthetic oligonucleotide
  Description of Combined DNA/RNA Molecule: Synthetic oligonucleotide
gcagctgcaaccuggcaaca

SEQ ID NO: 1810 - DNA, 20 bp, Artificial Sequence
  Description of Artificial Sequence: Synthetic oligonucleotide
  Description of Combined DNA/RNA Molecule: Synthetic oligonucleotide
gcagctgcaaccuggcaaca

SEQ ID NO: 1811 - DNA, 20 bp, Artificial Sequence
  Description of Artificial Sequence: Synthetic oligonucleotide
gagcagctgcaacctggcaa

SEQ ID NO: 1812 - DNA, 20 bp, Artificial Sequence
  Description of Artificial Sequence: Synthetic oligonucleotide
agcagctgcaacctggcaac

SEQ ID NO: 1813 - DNA, 20 bp, Artificial Sequence
  Description of Artificial Sequence: Synthetic oligonucleotide
gcagctgcaacctggcaaca

SEQ ID NO: 1814 - DNA, 20 bp, Artificial Sequence
  Description of Artificial Sequence: Synthetic oligonucleotide
  Description of Combined DNA/RNA Molecule: Synthetic oligonucleotide
cagcugcaacctggcaacaa

SEQ ID NO: 1815 - DNA, 20 bp, Artificial Sequence
  Description of Artificial Sequence: Synthetic oligonucleotide
  Description of Combined DNA/RNA Molecule: Synthetic oligonucleotide
agcugcaacctggcaacaac

SEQ ID NO: 1816 - DNA, 20 bp, Artificial Sequence
  Description of Artificial Sequence: Synthetic oligonucleotide
  Description of Combined DNA/RNA Molecule: Synthetic oligonucleotide
gcugcaacctggcaacaacc

SEQ ID NO: 1817 - DNA, 20 bp, Artificial Sequence
  Description of Artificial Sequence: Synthetic oligonucleotide
gggccaacagccagcctgca

SEQ ID NO: 1818 - DNA, 20 bp, Artificial Sequence
  Description of Artificial Sequence: Synthetic oligonucleotide
ggccaacagccagcctgcag

SEQ ID NO: 1819 - DNA, 20 bp, Artificial Sequence
  Description of Artificial Sequence: Synthetic oligonucleotide
gccaacagccagcctgcagg

SEQ ID NO: 1820 - DNA, 20 bp, Artificial Sequence
  Description of Artificial Sequence: Synthetic oligonucleotide
ccaacagccagcctgcagga

SEQ ID NO: 1821 - DNA, 20 bp, Artificial Sequence
  Description of Artificial Sequence: Synthetic oligonucleotide
caacagccagcctgcaggag

SEQ ID NO: 1822 - DNA, 20 bp, Artificial Sequence
  Description of Artificial Sequence: Synthetic oligonucleotide
aacagccagcctgcaggagg

SEQ ID NO: 1823 - DNA, 20 bp, Artificial Sequence
  Description of Artificial Sequence: Synthetic oligonucleotide
gggccaacagccagcctgca

SEQ ID NO: 1824 - DNA, 20 bp, Artificial Sequence
  Description of Artificial Sequence: Synthetic oligonucleotide
ggccaacagccagcctgcag

SEQ ID NO: 1825 - DNA, 20 bp, Artificial Sequence
  Description of Artificial Sequence: Synthetic oligonucleotide
gccaacagccagcctgcagg

SEQ ID NO: 1826 - DNA, 20 bp, Artificial Sequence
  Description of Artificial Sequence: Synthetic oligonucleotide
ccaacagccagcctgcagga

SEQ ID NO: 1827 - DNA, 20 bp, Artificial Sequence
  Description of Artificial Sequence: Synthetic oligonucleotide
caacagccagcctgcaggag

SEQ ID NO: 1828 - DNA, 20 bp, Artificial Sequence
  Description of Artificial Sequence: Synthetic oligonucleotide
aacagccagcctgcaggagg

SEQ ID NO: 1829 - RNA, 20 nt, Artificial Sequence
  Description of Artificial Sequence: Synthetic oligonucleotide
gggccaacagccagccugca

SEQ ID NO: 1830 - RNA, 20 nt, Artificial Sequence
  Description of Artificial Sequence: Synthetic oligonucleotide
ggccaacagccagccugcag

SEQ ID NO: 1831 - DNA, 20 bp, Artificial Sequence
  Description of Artificial Sequence: Synthetic oligonucleotide
gccaacagccagcctgcagg

SEQ ID NO: 1832 - DNA, 20 bp, Artificial Sequence
  Description of Artificial Sequence: Synthetic oligonucleotide
ccaacagccagcctgcagga

SEQ ID NO: 1833 - DNA, 20 bp, Artificial Sequence
  Description of Artificial Sequence: Synthetic oligonucleotide
caacagccagcctgcaggag

SEQ ID NO: 1834 - DNA, 20 bp, Artificial Sequence
  Description of Artificial Sequence: Synthetic oligonucleotide
aacagccagcctgcaggagg

SEQ ID NO: 1835 - RNA, 20 nt, Artificial Sequence
  Description of Artificial Sequence: Synthetic oligonucleotide
gggccaacagccagccugca

SEQ ID NO: 1836 - RNA, 20 nt, Artificial Sequence
  Description of Artificial Sequence: Synthetic oligonucleotide
gggccaacagccagccugca

SEQ ID NO: 1837 - RNA, 20 nt, Artificial Sequence
  Description of Artificial Sequence: Synthetic oligonucleotide
ggccaacagccagccugcag

SEQ ID NO: 1838 - RNA, 20 nt, Artificial Sequence
  Description of Artificial Sequence: Synthetic oligonucleotide
ggccaacagccagccugcag

SEQ ID NO: 1839 - RNA, 20 nt, Artificial Sequence
  Description of Artificial Sequence: Synthetic oligonucleotide
gccaacagccagccugcagg

SEQ ID NO: 1840 - RNA, 20 nt, Artificial Sequence
  Description of Artificial Sequence: Synthetic oligonucleotide
gccaacagccagccugcagg

SEQ ID NO: 1841 - RNA, 20 nt, Artificial Sequence
  Description of Artificial Sequence: Synthetic oligonucleotide
gggccaacagccagccugca

SEQ ID NO: 1842 - RNA, 20 nt, Artificial Sequence
  Description of Artificial Sequence: Synthetic oligonucleotide
ggccaacagccagccugcag

SEQ ID NO: 1843 - DNA, 20 bp, Artificial Sequence
  Description of Artificial Sequence: Synthetic oligonucleotide
gccaacagccagcctgcagg

SEQ ID NO: 1844 - DNA, 20 bp, Artificial Sequence
  Description of Artificial Sequence: Synthetic oligonucleotide
ccaacagccagcctgcagga

SEQ ID NO: 1845 - DNA, 20 bp, Artificial Sequence
  Description of Artificial Sequence: Synthetic oligonucleotide
caacagccagcctgcaggag

SEQ ID NO: 1846 - DNA, 20 bp, Artificial Sequence
  Description of Artificial Sequence: Synthetic oligonucleotide
aacagccagcctgcaggagg

SEQ ID NO: 1847 - DNA, 20 bp, Artificial Sequence
  Description of Artificial Sequence: Synthetic oligonucleotide
  Description of Combined DNA/RNA Molecule: Synthetic oligonucleotide
guaggagtagtgaaaggcca

SEQ ID NO: 1848 - DNA, 20 bp, Artificial Sequence
  Description of Artificial Sequence: Synthetic oligonucleotide
  Description of Combined DNA/RNA Molecule: Synthetic oligonucleotide
guaggagtagtgaaaggcca

SEQ ID NO: 1849 - DNA, 20 bp, Artificial Sequence
  Description of Artificial Sequence: Synthetic oligonucleotide
  Description of Combined DNA/RNA Molecule: Synthetic oligonucleotide
guaggagtagtgaaaggcca

SEQ ID NO: 1850 - DNA, 20 bp, Artificial Sequence
  Description of Artificial Sequence: Synthetic oligonucleotide
  Description of Combined DNA/RNA Molecule: Synthetic oligonucleotide
cucuuactgtgctgtggaca

SEQ ID NO: 1851 - DNA, 20 bp, Artificial Sequence
  Description of Artificial Sequence: Synthetic oligonucleotide
  Description of Combined DNA/RNA Molecule: Synthetic oligonucleotide
cucuuactgtgctgtggaca

SEQ ID NO: 1852 - DNA, 20 bp, Artificial Sequence
  Description of Artificial Sequence: Synthetic oligonucleotide
  Description of Combined DNA/RNA Molecule: Synthetic oligonucleotide
cucuuactgtgctgtggaca

SEQ ID NO: 1853 - DNA, 20 bp, Artificial Sequence
  Description of Artificial Sequence: Synthetic oligonucleotide
gggcacaagggcacagactt

SEQ ID NO: 1854 - DNA, 20 bp, Artificial Sequence
  Description of Artificial Sequence: Synthetic oligonucleotide
ggcacaagggcacagacttc

SEQ ID NO: 1855 - DNA, 20 bp, Artificial Sequence
  Description of Artificial Sequence: Synthetic oligonucleotide
gcacaagggcacagacttcc

SEQ ID NO: 1856 - DNA, 20 bp, Artificial Sequence
  Description of Artificial Sequence: Synthetic oligonucleotide
gggcacaagggcacagactt

SEQ ID NO: 1857 - DNA, 20 bp, Artificial Sequence
  Description of Artificial Sequence: Synthetic oligonucleotide
ggcacaagggcacagacttc

SEQ ID NO: 1858 - DNA, 20 bp, Artificial Sequence
  Description of Artificial Sequence: Synthetic oligonucleotide
gcacaagggcacagacttcc

SEQ ID NO: 1859 - RNA, 35 nt, Artificial Sequence
  Description of Artificial Sequence: Synthetic oligonucleotide
gagccuuuggaagucugcgcccuugugcccugccu

SEQ ID NO: 1860 - RNA, 35 nt, Artificial Sequence
  Description of Artificial Sequence: Synthetic oligonucleotide
gagccuuuggaagucugugcccuugugcccugccu

SEQ ID NO: 1861 - RNA, 21 nt, Artificial Sequence
  Description of Artificial Sequence: Synthetic oligonucleotide
cacacgggcacagacuuccaa

SEQ ID NO: 1862 - RNA, 21 nt, Artificial Sequence
  Description of Artificial Sequence: Synthetic oligonucleotide
ggaagucugugcccgugugcc

SEQ ID NO: 1863 - DNA, 20 bp, Artificial Sequence
  Description of Artificial Sequence: Synthetic oligonucleotide
  Description of Combined DNA/RNA Molecule: Synthetic oligonucleotide
auuaauaaattgtcatcacc

SEQ ID NO: 1864 - DNA, 20 bp, Artificial Sequence
  Description of Artificial Sequence: Synthetic oligonucleotide
  Description of Combined DNA/RNA Molecule: Synthetic oligonucleotide
auuaauaaattgtcatcacc

SEQ ID NO: 1865 - DNA, 20 bp, Artificial Sequence
  Description of Artificial Sequence: Synthetic oligonucleotide
  Description of Combined DNA/RNA Molecule: Synthetic oligonucleotide
auuaauaaattgtcatcacc

SEQ ID NO: 1866 - DNA, 20 bp, Artificial Sequence
  Description of Artificial Sequence: Synthetic oligonucleotide
  Description of Combined DNA/RNA Molecule: Synthetic oligonucleotide
auuaauaaattgtcatcacc

SEQ ID NO: 1867 - DNA, 20 bp, Artificial Sequence
  Description of Artificial Sequence: Synthetic oligonucleotide
  Description of Combined DNA/RNA Molecule: Synthetic oligonucleotide
auuaauaaattgtcatcacc

SEQ ID NO: 1868 - DNA, 20 bp, Artificial Sequence
  Description of Artificial Sequence: Synthetic oligonucleotide
  Description of Combined DNA/RNA Molecule: Synthetic oligonucleotide
auuaauaaattgtcatcacc

SEQ ID NO: 1869 - DNA, 20 bp, Artificial Sequence
  Description of Artificial Sequence: Synthetic oligonucleotide
  Description of Combined DNA/RNA Molecule: Synthetic oligonucleotide
auuaauaaattgtcatcacc

SEQ ID NO: 1870 - DNA, 20 bp, Artificial Sequence
  Description of Artificial Sequence: Synthetic oligonucleotide
  Description of Combined DNA/RNA Molecule: Synthetic oligonucleotide
auuaauaaattgtcatcacc

SEQ ID NO: 1871 - RNA, 20 nt, Artificial Sequence
  Description of Artificial Sequence: Synthetic oligonucleotide
ggcacaagggcacagacuuc

SEQ ID NO: 1872 - RNA, 20 nt, Artificial Sequence
  Description of Artificial Sequence: Synthetic oligonucleotide
ggcacaagggcacagacuuc

SEQ ID NO: 1873 - RNA, 20 nt, Artificial Sequence
  Description of Artificial Sequence: Synthetic oligonucleotide
ggcacaagggcacagacuuc

SEQ ID NO: 1874 - DNA, 20 bp, Artificial Sequence
  Description of Artificial Sequence: Synthetic oligonucleotide
ggcacaagggcacagacttc

SEQ ID NO: 1875 - DNA, 20 bp, Artificial Sequence
  Description of Artificial Sequence: Synthetic oligonucleotide
ggcacaagggcacagacttc

SEQ ID NO: 1876 - DNA, 20 bp, Artificial Sequence
  Description of Artificial Sequence: Synthetic oligonucleotide
ggcacaagggcacagacttc

SEQ ID NO: 1877 - RNA, 20 nt, Artificial Sequence
  Description of Artificial Sequence: Synthetic oligonucleotide
ggcacaagggcacagacuuc

SEQ ID NO: 1878 - RNA, 20 nt, Artificial Sequence
  Description of Artificial Sequence: Synthetic oligonucleotide
ggcacaagggcacagacuuc

SEQ ID NO: 1879 - DNA, 20 bp, Artificial Sequence
  Description of Artificial Sequence: Synthetic oligonucleotide
gcagggcacaagggcacaga

SEQ ID NO: 1880 - DNA, 20 bp, Artificial Sequence
  Description of Artificial Sequence: Synthetic oligonucleotide
gcagggcacaagggcacaga

SEQ ID NO: 1881 - DNA, 20 bp, Artificial Sequence
  Description of Artificial Sequence: Synthetic oligonucleotide
gcagggcacaagggcacaga

SEQ ID NO: 1882 - DNA, 20 bp, Artificial Sequence
  Description of Artificial Sequence: Synthetic oligonucleotide
gcagggcacaagggcacaga

SEQ ID NO: 1883 - DNA, 20 bp, Artificial Sequence
  Description of Artificial Sequence: Synthetic oligonucleotide
gcagggcacaagggcacaga

SEQ ID NO: 1884 - DNA, 20 bp, Artificial Sequence
  Description of Artificial Sequence: Synthetic oligonucleotide
cagggcacaagggcacagac

SEQ ID NO: 1885 - DNA, 20 bp, Artificial Sequence
  Description of Artificial Sequence: Synthetic oligonucleotide
cagggcacaagggcacagac

SEQ ID NO: 1886 - DNA, 20 bp, Artificial Sequence
  Description of Artificial Sequence: Synthetic oligonucleotide
cagggcacaagggcacagac

SEQ ID NO: 1887 - DNA, 20 bp, Artificial Sequence
  Description of Artificial Sequence: Synthetic oligonucleotide
cagggcacaagggcacagac

SEQ ID NO: 1888 - DNA, 20 bp, Artificial Sequence
  Description of Artificial Sequence: Synthetic oligonucleotide
cagggcacaagggcacagac

SEQ ID NO: 1889 - DNA, 20 bp, Artificial Sequence
  Description of Artificial Sequence: Synthetic oligonucleotide
agggcacaagggcacagact

SEQ ID NO: 1890 - DNA, 20 bp, Artificial Sequence
  Description of Artificial Sequence: Synthetic oligonucleotide
agggcacaagggcacagact

SEQ ID NO: 1891 - DNA, 20 bp, Artificial Sequence
  Description of Artificial Sequence: Synthetic oligonucleotide
agggcacaagggcacagact

SEQ ID NO: 1892 - RNA, 20 nt, Artificial Sequence
  Description of Artificial Sequence: Synthetic oligonucleotide
agggcacaagggcacagacu

SEQ ID NO: 1893 - RNA, 20 nt, Artificial Sequence
  Description of Artificial Sequence: Synthetic oligonucleotide
agggcacaagggcacagacu

SEQ ID NO: 1894 - DNA, 20 bp, Artificial Sequence
  Description of Artificial Sequence: Synthetic oligonucleotide
aagggcacagacttccaaag

SEQ ID NO: 1895 - DNA, 20 bp, Artificial Sequence
  Description of Artificial Sequence: Synthetic oligonucleotide
aagggcacagacttccaaag

SEQ ID NO: 1896 - DNA, 20 bp, Artificial Sequence
  Description of Artificial Sequence: Synthetic oligonucleotide
aagggcacagacttccaaag

SEQ ID NO: 1897 - DNA, 20 bp, Artificial Sequence
  Description of Artificial Sequence: Synthetic oligonucleotide
aagggcacagacttccaaag

SEQ ID NO: 1898 - DNA, 20 bp, Artificial Sequence
  Description of Artificial Sequence: Synthetic oligonucleotide
aagggcacagacttccaaag

SEQ ID NO: 1899 - DNA, 20 bp, Artificial Sequence
  Description of Artificial Sequence: Synthetic oligonucleotide
aagggcacagacttccaaag

SEQ ID NO: 1900 - DNA, 20 bp, Artificial Sequence
  Description of Artificial Sequence: Synthetic oligonucleotide
aagggcacagacttccaaag

SEQ ID NO: 1901 - DNA, 20 bp, Artificial Sequence
  Description of Artificial Sequence: Synthetic oligonucleotide
agggcacagacttccaaagg

SEQ ID NO: 1902 - DNA, 20 bp, Artificial Sequence
  Description of Artificial Sequence: Synthetic oligonucleotide
agggcacagacttccaaagg

SEQ ID NO: 1903 - DNA, 20 bp, Artificial Sequence
  Description of Artificial Sequence: Synthetic oligonucleotide
agggcacagacttccaaagg

SEQ ID NO: 1904 - DNA, 20 bp, Artificial Sequence
  Description of Artificial Sequence: Synthetic oligonucleotide
agggcacagacttccaaagg

SEQ ID NO: 1905 - DNA, 20 bp, Artificial Sequence
  Description of Artificial Sequence: Synthetic oligonucleotide
agggcacagacttccaaagg

SEQ ID NO: 1906 - DNA, 20 bp, Artificial Sequence
  Description of Artificial Sequence: Synthetic oligonucleotide
agggcacagacttccaaagg

SEQ ID NO: 1907 - DNA, 20 bp, Artificial Sequence
  Description of Artificial Sequence: Synthetic oligonucleotide
agggcacagacttccaaagg

SEQ ID NO: 1908 - DNA, 20 bp, Artificial Sequence
  Description of Artificial Sequence: Synthetic oligonucleotide
gggcacagacttccaaaggc

SEQ ID NO: 1909 - DNA, 20 bp, Artificial Sequence
  Description of Artificial Sequence: Synthetic oligonucleotide
gggcacagacttccaaaggc

SEQ ID NO: 1910 - DNA, 20 bp, Artificial Sequence
  Description of Artificial Sequence: Synthetic oligonucleotide
gggcacagacttccaaaggc

SEQ ID NO: 1911 - DNA, 20 bp, Artificial Sequence
  Description of Artificial Sequence: Synthetic oligonucleotide
gggcacagacttccaaaggc

SEQ ID NO: 1912 - DNA, 20 bp, Artificial Sequence
  Description of Artificial Sequence: Synthetic oligonucleotide
gggcacagacttccaaaggc

SEQ ID NO: 1913 - DNA, 20 bp, Artificial Sequence
  Description of Artificial Sequence: Synthetic oligonucleotide
  Description of Combined DNA/RNA Molecule: Synthetic oligonucleotide
ggcacaagggcacagacutc

SEQ ID NO: 1914 - DNA, 20 bp, Artificial Sequence
  Description of Artificial Sequence: Synthetic oligonucleotide
ggcacaagggcacagacttc

SEQ ID NO: 1915 - RNA, 20 nt, Artificial Sequence
  Description of Artificial Sequence: Synthetic oligonucleotide
ggcacaagggcacagacuuc

SEQ ID NO: 1916 - DNA, 20 bp, Artificial Sequence
  Description of Artificial Sequence: Synthetic oligonucleotide
  Description of Combined DNA/RNA Molecule: Synthetic oligonucleotide
auuaauaaattgtcatcacc

SEQ ID NO: 1917 - DNA, 20 bp, Artificial Sequence
  Description of Artificial Sequence: Synthetic oligonucleotide
  Description of Combined DNA/RNA Molecule: Synthetic oligonucleotide
auuaauaaattgtcatcacc

SEQ ID NO: 1918 - RNA, 20 nt, Artificial Sequence
  Description of Artificial Sequence: Synthetic oligonucleotide
ggcacaagggcacagacuuc

SEQ ID NO: 1919 - RNA, 20 nt, Artificial Sequence
  Description of Artificial Sequence: Synthetic oligonucleotide
ggcacaagggcacagacuuc

SEQ ID NO: 1920 - DNA, 20 bp, Artificial Sequence
  Description of Artificial Sequence: Synthetic oligonucleotide
ggcacaagggcacagacttc

SEQ ID NO: 1921 - DNA, 20 bp, Artificial Sequence
  Description of Artificial Sequence: Synthetic oligonucleotide
ggcacaagggcacagacttc

SEQ ID NO: 1922 - DNA, 20 bp, Artificial Sequence
  Description of Artificial Sequence: Synthetic oligonucleotide
ctcagtaacattgacaccac

SEQ ID NO: 1923 - DNA, 20 bp, Artificial Sequence
  Description of Artificial Sequence: Synthetic oligonucleotide
  Description of Combined DNA/RNA Molecule: Synthetic oligonucleotide
cucagtaacattgacaccac

SEQ ID NO: 1924 - DNA, 20 bp, Artificial Sequence
  Description of Artificial Sequence: Synthetic oligonucleotide
  Description of Combined DNA/RNA Molecule: Synthetic oligonucleotide
ggcacaagggcacagacutc

SEQ ID NO: 1925 - DNA, 20 bp, Artificial Sequence
  Description of Artificial Sequence: Synthetic oligonucleotide
ctcagtaacattgacaccac

SEQ ID NO: 1926 - DNA, 20 bp, Artificial Sequence
  Description of Artificial Sequence: Synthetic oligonucleotide
ctcagtaacattgacaccac

SEQ ID NO: 1927 - RNA, 20 nt, Artificial Sequence
  Description of Artificial Sequence: Synthetic oligonucleotide
gaagucugugcccuugugcc

SEQ ID NO: 1928 - DNA, 20 bp, Artificial Sequence
  Description of Artificial Sequence: Synthetic oligonucleotide
  Description of Combined DNA/RNA Molecule: Synthetic oligonucleotide
ggcacaagggcacagacutc

SEQ ID NO: 1929 - DNA, 20 bp, Artificial Sequence
  Description of Artificial Sequence: Synthetic oligonucleotide
  Description of Combined DNA/RNA Molecule: Synthetic oligonucleotide
tgtcatcaccagaaaaaguc

SEQ ID NO: 1930 - DNA, 20 bp, Artificial Sequence
  Description of Artificial Sequence: Synthetic oligonucleotide
  Description of Combined DNA/RNA Molecule: Synthetic oligonucleotide
utgtcatcaccagaaaaagu

SEQ ID NO: 1931 - DNA, 20 bp, Artificial Sequence
  Description of Artificial Sequence: Synthetic oligonucleotide
  Description of Combined DNA/RNA Molecule: Synthetic oligonucleotide
ttgtcatcaccagaaaaagu

SEQ ID NO: 1932 - DNA, 20 bp, Artificial Sequence
  Description of Artificial Sequence: Synthetic oligonucleotide
  Description of Combined DNA/RNA Molecule: Synthetic oligonucleotide
autgtcatcaccagaaaaag

SEQ ID NO: 1933 - DNA, 20 bp, Artificial Sequence
  Description of Artificial Sequence: Synthetic oligonucleotide
attgtcatcaccagaaaaag

SEQ ID NO: 1934 - DNA, 20 bp, Artificial Sequence
  Description of Artificial Sequence: Synthetic oligonucleotide
  Description of Combined DNA/RNA Molecule: Synthetic oligonucleotide
aautgtcatcaccagaaaaa

SEQ ID NO: 1935 - DNA, 20 bp, Artificial Sequence
  Description of Artificial Sequence: Synthetic oligonucleotide
aattgtcatcaccagaaaaa

SEQ ID NO: 1936 - DNA, 20 bp, Artificial Sequence
  Description of Artificial Sequence: Synthetic oligonucleotide
aaattgtcatcaccagaaaa

SEQ ID NO: 1937 - DNA, 20 bp, Artificial Sequence
  Description of Artificial Sequence: Synthetic oligonucleotide
  Description of Combined DNA/RNA Molecule: Synthetic oligonucleotide
aaautgtcatcaccagaaaa

SEQ ID NO: 1938 - DNA, 20 bp, Artificial Sequence
  Description of Artificial Sequence: Synthetic oligonucleotide
  Description of Combined DNA/RNA Molecule: Synthetic oligonucleotide
uaaautgtcatcaccagaaa

SEQ ID NO: 1939 - DNA, 20 bp, Artificial Sequence
  Description of Artificial Sequence: Synthetic oligonucleotide
  Description of Combined DNA/RNA Molecule: Synthetic oligonucleotide
uaaautgtcatcaccagaaa

SEQ ID NO: 1940 - DNA, 20 bp, Artificial Sequence
  Description of Artificial Sequence: Synthetic oligonucleotide
  Description of Combined DNA/RNA Molecule: Synthetic oligonucleotide
auaaattgtcatcaccagaa

SEQ ID NO: 1941 - DNA, 20 bp, Artificial Sequence
  Description of Artificial Sequence: Synthetic oligonucleotide
  Description of Combined DNA/RNA Molecule: Synthetic oligonucleotide
auaaattgtcatcaccagaa

SEQ ID NO: 1942 - DNA, 20 bp, Artificial Sequence
  Description of Artificial Sequence: Synthetic oligonucleotide
  Description of Combined DNA/RNA Molecule: Synthetic oligonucleotide
aauaaattgtcatcaccaga

SEQ ID NO: 1943 - DNA, 20 bp, Artificial Sequence
  Description of Artificial Sequence: Synthetic oligonucleotide
  Description of Combined DNA/RNA Molecule: Synthetic oligonucleotide
aauaaattgtcatcaccaga

SEQ ID NO: 1944 - DNA, 20 bp, Artificial Sequence
  Description of Artificial Sequence: Synthetic oligonucleotide
  Description of Combined DNA/RNA Molecule: Synthetic oligonucleotide
aauaaattgtcatcaccaga

SEQ ID NO: 1945 - DNA, 20 bp, Artificial Sequence
  Description of Artificial Sequence: Synthetic oligonucleotide
  Description of Combined DNA/RNA Molecule: Synthetic oligonucleotide
uaauaaattgtcatcaccag

SEQ ID NO: 1946 - DNA, 20 bp, Artificial Sequence
  Description of Artificial Sequence: Synthetic oligonucleotide
  Description of Combined DNA/RNA Molecule: Synthetic oligonucleotide
uaauaaattgtcatcaccag

SEQ ID NO: 1947 - DNA, 20 bp, Artificial Sequence
  Description of Artificial Sequence: Synthetic oligonucleotide
  Description of Combined DNA/RNA Molecule: Synthetic oligonucleotide
uaauaaattgtcatcaccag

SEQ ID NO: 1948 - DNA, 20 bp, Artificial Sequence
  Description of Artificial Sequence: Synthetic oligonucleotide
  Description of Combined DNA/RNA Molecule: Synthetic oligonucleotide
uaauaaattgtcatcaccag

SEQ ID NO: 1949 - DNA, 20 bp, Artificial Sequence
  Description of Artificial Sequence: Synthetic oligonucleotide
  Description of Combined DNA/RNA Molecule: Synthetic oligonucleotide
uuaauaaattgtcatcacca

SEQ ID NO: 1950 - DNA, 20 bp, Artificial Sequence
  Description of Artificial Sequence: Synthetic oligonucleotide
  Description of Combined DNA/RNA Molecule: Synthetic oligonucleotide
uuaauaaattgtcatcacca

SEQ ID NO: 1951 - DNA, 20 bp, Artificial Sequence
  Description of Artificial Sequence: Synthetic oligonucleotide
  Description of Combined DNA/RNA Molecule: Synthetic oligonucleotide
uuaauaaattgtcatcacca

SEQ ID NO: 1952 - DNA, 20 bp, Artificial Sequence
  Description of Artificial Sequence: Synthetic oligonucleotide
  Description of Combined DNA/RNA Molecule: Synthetic oligonucleotide
uuaauaaattgtcatcacca

SEQ ID NO: 1953 - DNA, 20 bp, Artificial Sequence
  Description of Artificial Sequence: Synthetic oligonucleotide
  Description of Combined DNA/RNA Molecule: Synthetic oligonucleotide
auuaataaattgtcatcacc

SEQ ID NO: 1954 - DNA, 20 bp, Artificial Sequence
  Description of Artificial Sequence: Synthetic oligonucleotide
  Description of Combined DNA/RNA Molecule: Synthetic oligonucleotide
auuaataaattgtcatcacc

SEQ ID NO: 1955 - DNA, 20 bp, Artificial Sequence
  Description of Artificial Sequence: Synthetic oligonucleotide
  Description of Combined DNA/RNA Molecule: Synthetic oligonucleotide
auuaataaattgtcatcacc

SEQ ID NO: 1956 - DNA, 20 bp, Artificial Sequence
  Description of Artificial Sequence: Synthetic oligonucleotide
  Description of Combined DNA/RNA Molecule: Synthetic oligonucleotide
auuaataaattgtcatcacc

SEQ ID NO: 1957 - DNA, 20 bp, Artificial Sequence
  Description of Artificial Sequence: Synthetic oligonucleotide
  Description of Combined DNA/RNA Molecule: Synthetic oligonucleotide
uauuaataaattgtcatcac

SEQ ID NO: 1958 - DNA, 20 bp, Artificial Sequence
  Description of Artificial Sequence: Synthetic oligonucleotide
  Description of Combined DNA/RNA Molecule: Synthetic oligonucleotide
uauuaataaattgtcatcac

SEQ ID NO: 1959 - DNA, 20 bp, Artificial Sequence
  Description of Artificial Sequence: Synthetic oligonucleotide
  Description of Combined DNA/RNA Molecule: Synthetic oligonucleotide
uauuaataaattgtcatcac

SEQ ID NO: 1960 - DNA, 20 bp, Artificial Sequence
  Description of Artificial Sequence: Synthetic oligonucleotide
  Description of Combined DNA/RNA Molecule: Synthetic oligonucleotide
cuauuaataaattgtcatca

SEQ ID NO: 1961 - DNA, 20 bp, Artificial Sequence
  Description of Artificial Sequence: Synthetic oligonucleotide
  Description of Combined DNA/RNA Molecule: Synthetic oligonucleotide
cuauuaataaattgtcatca

SEQ ID NO: 1962 - DNA, 20 bp, Artificial Sequence
  Description of Artificial Sequence: Synthetic oligonucleotide
  Description of Combined DNA/RNA Molecule: Synthetic oligonucleotide
acuautaataaattgtcatc

SEQ ID NO: 1963 - DNA, 20 bp, Artificial Sequence
  Description of Artificial Sequence: Synthetic oligonucleotide
  Description of Combined DNA/RNA Molecule: Synthetic oligonucleotide
tgtcatcaccagaaaaaguc

SEQ ID NO: 1964 - DNA, 20 bp, Artificial Sequence
  Description of Artificial Sequence: Synthetic oligonucleotide
  Description of Combined DNA/RNA Molecule: Synthetic oligonucleotide
utgtcatcaccagaaaaagu

SEQ ID NO: 1965 - DNA, 20 bp, Artificial Sequence
  Description of Artificial Sequence: Synthetic oligonucleotide
  Description of Combined DNA/RNA Molecule: Synthetic oligonucleotide
ttgtcatcaccagaaaaagu

SEQ ID NO: 1966 - DNA, 20 bp, Artificial Sequence
  Description of Artificial Sequence: Synthetic oligonucleotide
  Description of Combined DNA/RNA Molecule: Synthetic oligonucleotide
autgtcatcaccagaaaaag

SEQ ID NO: 1967 - DNA, 20 bp, Artificial Sequence
  Description of Artificial Sequence: Synthetic oligonucleotide
attgtcatcaccagaaaaag

SEQ ID NO: 1968 - DNA, 20 bp, Artificial Sequence
  Description of Artificial Sequence: Synthetic oligonucleotide
  Description of Combined DNA/RNA Molecule: Synthetic oligonucleotide
aautgtcatcaccagaaaaa

SEQ ID NO: 1969 - DNA, 20 bp, Artificial Sequence
  Description of Artificial Sequence: Synthetic oligonucleotide
aattgtcatcaccagaaaaa

SEQ ID NO: 1970 - DNA, 20 bp, Artificial Sequence
  Description of Artificial Sequence: Synthetic oligonucleotide
aaattgtcatcaccagaaaa

SEQ ID NO: 1971 - DNA, 20 bp, Artificial Sequence
  Description of Artificial Sequence: Synthetic oligonucleotide
  Description of Combined DNA/RNA Molecule: Synthetic oligonucleotide
aaautgtcatcaccagaaaa

SEQ ID NO: 1972 - DNA, 20 bp, Artificial Sequence
  Description of Artificial Sequence: Synthetic oligonucleotide
  Description of Combined DNA/RNA Molecule: Synthetic oligonucleotide
uaaautgtcatcaccagaaa

SEQ ID NO: 1973 - DNA, 20 bp, Artificial Sequence
  Description of Artificial Sequence: Synthetic oligonucleotide
  Description of Combined DNA/RNA Molecule: Synthetic oligonucleotide
uaaautgtcatcaccagaaa

SEQ ID NO: 1974 - DNA, 20 bp, Artificial Sequence
  Description of Artificial Sequence: Synthetic oligonucleotide
  Description of Combined DNA/RNA Molecule: Synthetic oligonucleotide
auaaattgtcatcaccagaa

SEQ ID NO: 1975 - DNA, 20 bp, Artificial Sequence
  Description of Artificial Sequence: Synthetic oligonucleotide
  Description of Combined DNA/RNA Molecule: Synthetic oligonucleotide
auaaattgtcatcaccagaa

SEQ ID NO: 1976 - DNA, 20 bp, Artificial Sequence
  Description of Artificial Sequence: Synthetic oligonucleotide
  Description of Combined DNA/RNA Molecule: Synthetic oligonucleotide
aauaaattgtcatcaccaga

SEQ ID NO: 1977 - DNA, 20 bp, Artificial Sequence
  Description of Artificial Sequence: Synthetic oligonucleotide
  Description of Combined DNA/RNA Molecule: Synthetic oligonucleotide
aauaaattgtcatcaccaga

SEQ ID NO: 1978 - DNA, 20 bp, Artificial Sequence
  Description of Artificial Sequence: Synthetic oligonucleotide
  Description of Combined DNA/RNA Molecule: Synthetic oligonucleotide
aauaaattgtcatcaccaga

SEQ ID NO: 1979 - DNA, 20 bp, Artificial Sequence
  Description of Artificial Sequence: Synthetic oligonucleotide
  Description of Combined DNA/RNA Molecule: Synthetic oligonucleotide
uaauaaattgtcatcaccag

SEQ ID NO: 1980 - DNA, 20 bp, Artificial Sequence
  Description of Artificial Sequence: Synthetic oligonucleotide
  Description of Combined DNA/RNA Molecule: Synthetic oligonucleotide
uaauaaattgtcatcaccag

SEQ ID NO: 1981 - DNA, 20 bp, Artificial Sequence
  Description of Artificial Sequence: Synthetic oligonucleotide
  Description of Combined DNA/RNA Molecule: Synthetic oligonucleotide
uaauaaattgtcatcaccag

SEQ ID NO: 1982 - DNA, 20 bp, Artificial Sequence
  Description of Artificial Sequence: Synthetic oligonucleotide
  Description of Combined DNA/RNA Molecule: Synthetic oligonucleotide
uaauaaattgtcatcaccag

SEQ ID NO: 1983 - DNA, 20 bp, Artificial Sequence
  Description of Artificial Sequence: Synthetic oligonucleotide
  Description of Combined DNA/RNA Molecule: Synthetic oligonucleotide
uuaauaaattgtcatcacca

SEQ ID NO: 1984 - DNA, 20 bp, Artificial Sequence
  Description of Artificial Sequence: Synthetic oligonucleotide
  Description of Combined DNA/RNA Molecule: Synthetic oligonucleotide
uuaauaaattgtcatcacca

SEQ ID NO: 1985 - DNA, 20 bp, Artificial Sequence
  Description of Artificial Sequence: Synthetic oligonucleotide
  Description of Combined DNA/RNA Molecule: Synthetic oligonucleotide
uuaauaaattgtcatcacca

SEQ ID NO: 1986 - DNA, 20 bp, Artificial Sequence
  Description of Artificial Sequence: Synthetic oligonucleotide
  Description of Combined DNA/RNA Molecule: Synthetic oligonucleotide
uuaauaaattgtcatcacca

SEQ ID NO: 1987 - DNA, 20 bp, Artificial Sequence
  Description of Artificial Sequence: Synthetic oligonucleotide
  Description of Combined DNA/RNA Molecule: Synthetic oligonucleotide
auuaataaattgtcatcacc

SEQ ID NO: 1988 - DNA, 20 bp, Artificial Sequence
  Description of Artificial Sequence: Synthetic oligonucleotide
  Description of Combined DNA/RNA Molecule: Synthetic oligonucleotide
auuaataaattgtcatcacc

SEQ ID NO: 1989 - DNA, 20 bp, Artificial Sequence
  Description of Artificial Sequence: Synthetic oligonucleotide
  Description of Combined DNA/RNA Molecule: Synthetic oligonucleotide
auuaataaattgtcatcacc

SEQ ID NO: 1990 - DNA, 20 bp, Artificial Sequence
  Description of Artificial Sequence: Synthetic oligonucleotide
  Description of Combined DNA/RNA Molecule: Synthetic oligonucleotide
auuaataaattgtcatcacc

SEQ ID NO: 1991 - DNA, 20 bp, Artificial Sequence
  Description of Artificial Sequence: Synthetic oligonucleotide
  Description of Combined DNA/RNA Molecule: Synthetic oligonucleotide
uauuaataaattgtcatcac

SEQ ID NO: 1992 - DNA, 20 bp, Artificial Sequence
  Description of Artificial Sequence: Synthetic oligonucleotide
  Description of Combined DNA/RNA Molecule: Synthetic oligonucleotide
uauuaataaattgtcatcac

SEQ ID NO: 1993 - DNA, 20 bp, Artificial Sequence
  Description of Artificial Sequence: Synthetic oligonucleotide
  Description of Combined DNA/RNA Molecule: Synthetic oligonucleotide
uauuaataaattgtcatcac

SEQ ID NO: 1994 - DNA, 20 bp, Artificial Sequence
  Description of Artificial Sequence: Synthetic oligonucleotide
  Description of Combined DNA/RNA Molecule: Synthetic oligonucleotide
cuauuaataaattgtcatca

SEQ ID NO: 1995 - DNA, 20 bp, Artificial Sequence
  Description of Artificial Sequence: Synthetic oligonucleotide
  Description of Combined DNA/RNA Molecule: Synthetic oligonucleotide
cuauuaataaattgtcatca

SEQ ID NO: 1996 - DNA, 20 bp, Artificial Sequence
  Description of Artificial Sequence: Synthetic oligonucleotide
  Description of Combined DNA/RNA Molecule: Synthetic oligonucleotide
acuautaataaattgtcatc

SEQ ID NO: 1997 - RNA, 32 nt, Artificial Sequence
  Description of Artificial Sequence: Synthetic oligonucleotide
gacuuuuucuggugauggcaauuuauuaauag

SEQ ID NO: 1998 - RNA, 32 nt, Artificial Sequence
  Description of Artificial Sequence: Synthetic oligonucleotide
gacuuuuucuggugaugacaauuuauuaauag

SEQ ID NO: 1999 - DNA, 20 bp, Artificial Sequence
  Description of Artificial Sequence: Synthetic oligonucleotide
  Description of Combined DNA/RNA Molecule: Synthetic oligonucleotide
uaaautgtcatcaccagaaa

SEQ ID NO: 2000 - DNA, 20 bp, Artificial Sequence
  Description of Artificial Sequence: Synthetic oligonucleotide
  Description of Combined DNA/RNA Molecule: Synthetic oligonucleotide
auaaattgtcatcaccagaa

SEQ ID NO: 2001 - DNA, 20 bp, Artificial Sequence
  Description of Artificial Sequence: Synthetic oligonucleotide
  Description of Combined DNA/RNA Molecule: Synthetic oligonucleotide
aauaaattgtcatcaccaga

SEQ ID NO: 2002 - DNA, 20 bp, Artificial Sequence
  Description of Artificial Sequence: Synthetic oligonucleotide
  Description of Combined DNA/RNA Molecule: Synthetic oligonucleotide
uaauaaattgtcatcaccag

SEQ ID NO: 2003 - DNA, 20 bp, Artificial Sequence
  Description of Artificial Sequence: Synthetic oligonucleotide
  Description of Combined DNA/RNA Molecule: Synthetic oligonucleotide
aauaaattgtcatcaccaga

SEQ ID NO: 2004 - DNA, 20 bp, Artificial Sequence
  Description of Artificial Sequence: Synthetic oligonucleotide
  Description of Combined DNA/RNA Molecule: Synthetic oligonucleotide
uaauaaattgtcatcaccag

SEQ ID NO: 2005 - RNA, 20 nt, Artificial Sequence
  Description of Artificial Sequence: Synthetic oligonucleotide
gcacaagggcacagacuucc

SEQ ID NO: 2006 - RNA, 20 nt, Artificial Sequence
  Description of Artificial Sequence: Synthetic oligonucleotide
gcacaagggcacagacuucc

SEQ ID NO: 2007 - RNA, 20 nt, Artificial Sequence
  Description of Artificial Sequence: Synthetic oligonucleotide
cacaagggcacagacuucca

SEQ ID NO: 2008 - RNA, 20 nt, Artificial Sequence
  Description of Artificial Sequence: Synthetic oligonucleotide
cacaagggcacagacuucca

SEQ ID NO: 2009 - DNA, 20 bp, Artificial Sequence
  Description of Artificial Sequence: Synthetic oligonucleotide
  Description of Combined DNA/RNA Molecule: Synthetic oligonucleotide
uaaautgtcatcaccagaaa

SEQ ID NO: 2010 - DNA, 20 bp, Artificial Sequence
  Description of Artificial Sequence: Synthetic oligonucleotide
  Description of Combined DNA/RNA Molecule: Synthetic oligonucleotide
auaaattgtcatcaccagaa

SEQ ID NO: 2011 - DNA, 20 bp, Artificial Sequence
  Description of Artificial Sequence: Synthetic oligonucleotide
  Description of Combined DNA/RNA Molecule: Synthetic oligonucleotide
aauaaattgtcatcaccaga

SEQ ID NO: 2012 - DNA, 20 bp, Artificial Sequence
  Description of Artificial Sequence: Synthetic oligonucleotide
  Description of Combined DNA/RNA Molecule: Synthetic oligonucleotide
uaauaaattgtcatcaccag

SEQ ID NO: 2013 - RNA, 20 nt, Artificial Sequence
  Description of Artificial Sequence: Synthetic oligonucleotide
uccccacagagggaggaagc

SEQ ID NO: 2014 - RNA, 20 nt, Artificial Sequence
  Description of Artificial Sequence: Synthetic oligonucleotide
cuccccacagagggaggaag

SEQ ID NO: 2015 - RNA, 20 nt, Artificial Sequence
  Description of Artificial Sequence: Synthetic oligonucleotide
ccuccccacagagggaggaa

SEQ ID NO: 2016 - RNA, 20 nt, Artificial Sequence
  Description of Artificial Sequence: Synthetic oligonucleotide
uccuccccacagagggagga

SEQ ID NO: 2017 - RNA, 20 nt, Artificial Sequence
  Description of Artificial Sequence: Synthetic oligonucleotide
guccuccccacagagggagg

SEQ ID NO: 2018 - DNA, 20 bp, Artificial Sequence
  Description of Artificial Sequence: Synthetic oligonucleotide
  Description of Combined DNA/RNA Molecule: Synthetic oligonucleotide
ggucctccccacagagggag

SEQ ID NO: 2019 - DNA, 20 bp, Artificial Sequence
  Description of Artificial Sequence: Synthetic oligonucleotide
  Description of Combined DNA/RNA Molecule: Synthetic oligonucleotide
gggucctccccacagaggga

SEQ ID NO: 2020 - DNA, 20 bp, Artificial Sequence
  Description of Artificial Sequence: Synthetic oligonucleotide
  Description of Combined DNA/RNA Molecule: Synthetic oligonucleotide
cgggucctccccacagaggg

SEQ ID NO: 2021 - DNA, 20 bp, Artificial Sequence
  Description of Artificial Sequence: Synthetic oligonucleotide
  Description of Combined DNA/RNA Molecule: Synthetic oligonucleotide
acaguagatgagggagcagg

SEQ ID NO: 2022 - DNA, 20 bp, Artificial Sequence
  Description of Artificial Sequence: Synthetic oligonucleotide
cacagtagatgagggagcag

SEQ ID NO: 2023 - DNA, 20 bp, Artificial Sequence
  Description of Artificial Sequence: Synthetic oligonucleotide
acacagtagatgagggagca

SEQ ID NO: 2024 - DNA, 20 bp, Artificial Sequence
  Description of Artificial Sequence: Synthetic oligonucleotide
cacacagtagatgagggagc

SEQ ID NO: 2025 - DNA, 20 bp, Artificial Sequence
  Description of Artificial Sequence: Synthetic oligonucleotide
gcacacagtagatgagggag

SEQ ID NO: 2026 - DNA, 20 bp, Artificial Sequence
  Description of Artificial Sequence: Synthetic oligonucleotide
  Description of Combined DNA/RNA Molecule: Synthetic oligonucleotide
ugcacacagtagatgaggga

SEQ ID NO: 2027 - DNA, 20 bp, Artificial Sequence
  Description of Artificial Sequence: Synthetic oligonucleotide
  Description of Combined DNA/RNA Molecule: Synthetic oligonucleotide
gugcacacagtagatgaggg

SEQ ID NO: 2028 - DNA, 20 bp, Artificial Sequence
  Description of Artificial Sequence: Synthetic oligonucleotide
  Description of Combined DNA/RNA Molecule: Synthetic oligonucleotide
agugcacacagtagaugagg

SEQ ID NO: 2029 - RNA, 20 nt, Artificial Sequence
  Description of Artificial Sequence: Synthetic oligonucleotide
uccccacagagggaggaagc

SEQ ID NO: 2030 - RNA, 20 nt, Artificial Sequence
  Description of Artificial Sequence: Synthetic oligonucleotide
cuccccacagagggaggaag

SEQ ID NO: 2031 - RNA, 20 nt, Artificial Sequence
  Description of Artificial Sequence: Synthetic oligonucleotide
ccuccccacagagggaggaa

SEQ ID NO: 2032 - RNA, 20 nt, Artificial Sequence
  Description of Artificial Sequence: Synthetic oligonucleotide
uccuccccacagagggagga

SEQ ID NO: 2033 - RNA, 20 nt, Artificial Sequence
  Description of Artificial Sequence: Synthetic oligonucleotide
guccuccccacagagggagg

SEQ ID NO: 2034 - DNA, 20 bp, Artificial Sequence
  Description of Artificial Sequence: Synthetic oligonucleotide
  Description of Combined DNA/RNA Molecule: Synthetic oligonucleotide
ggucctccccacagagggag

SEQ ID NO: 2035 - DNA, 20 bp, Artificial Sequence
  Description of Artificial Sequence: Synthetic oligonucleotide
  Description of Combined DNA/RNA Molecule: Synthetic oligonucleotide
gggucctccccacagaggga

SEQ ID NO: 2036 - DNA, 20 bp, Artificial Sequence
  Description of Artificial Sequence: Synthetic oligonucleotide
  Description of Combined DNA/RNA Molecule: Synthetic oligonucleotide
cgggucctccccacagaggg

SEQ ID NO: 2037 - DNA, 20 bp, Artificial Sequence
  Description of Artificial Sequence: Synthetic oligonucleotide
  Description of Combined DNA/RNA Molecule: Synthetic oligonucleotide
acaguagatgagggagcagg

SEQ ID NO: 2038 - DNA, 20 bp, Artificial Sequence
  Description of Artificial Sequence: Synthetic oligonucleotide
cacagtagatgagggagcag

SEQ ID NO: 2039 - DNA, 20 bp, Artificial Sequence
  Description of Artificial Sequence: Synthetic oligonucleotide
acacagtagatgagggagca

SEQ ID NO: 2040 - DNA, 20 bp, Artificial Sequence
  Description of Artificial Sequence: Synthetic oligonucleotide
cacacagtagatgagggagc

SEQ ID NO: 2041 - DNA, 20 bp, Artificial Sequence
  Description of Artificial Sequence: Synthetic oligonucleotide
gcacacagtagatgagggag

SEQ ID NO: 2042 - DNA, 20 bp, Artificial Sequence
  Description of Artificial Sequence: Synthetic oligonucleotide
  Description of Combined DNA/RNA Molecule: Synthetic oligonucleotide
ugcacacagtagatgaggga

SEQ ID NO: 2043 - DNA, 20 bp, Artificial Sequence
  Description of Artificial Sequence: Synthetic oligonucleotide
  Description of Combined DNA/RNA Molecule: Synthetic oligonucleotide
gugcacacagtagatgaggg

SEQ ID NO: 2044 - DNA, 20 bp, Artificial Sequence
  Description of Artificial Sequence: Synthetic oligonucleotide
  Description of Combined DNA/RNA Molecule: Synthetic oligonucleotide
agugcacacagtagaugagg

SEQ ID NO: 2045 - DNA, 20 bp, Artificial Sequence
  Description of Artificial Sequence: Synthetic oligonucleotide
ggcacaagggcacagacttc

SEQ ID NO: 2046 - RNA, 20 nt, Artificial Sequence
  Description of Artificial Sequence: Synthetic oligonucleotide
ggcacaagggcacagacuuc

SEQ ID NO: 2047 - DNA, 20 bp, Artificial Sequence
  Description of Artificial Sequence: Synthetic oligonucleotide
  Description of Combined DNA/RNA Molecule: Synthetic oligonucleotide
gggucctccccacagaggga

SEQ ID NO: 2048 - DNA, 20 bp, Artificial Sequence
  Description of Artificial Sequence: Synthetic oligonucleotide
  Description of Combined DNA/RNA Molecule: Synthetic oligonucleotide
gggucctccccacagaggga

SEQ ID NO: 2049 - DNA, 20 bp, Artificial Sequence
  Description of Artificial Sequence: Synthetic oligonucleotide
  Description of Combined DNA/RNA Molecule: Synthetic oligonucleotide
gggucctccccacagaggga

SEQ ID NO: 2050 - DNA, 20 bp, Artificial Sequence
  Description of Artificial Sequence: Synthetic oligonucleotide
  Description of Combined DNA/RNA Molecule: Synthetic oligonucleotide
gggucctccccacagaggga

SEQ ID NO: 2051 - DNA, 20 bp, Artificial Sequence
  Description of Artificial Sequence: Synthetic oligonucleotide
  Description of Combined DNA/RNA Molecule: Synthetic oligonucleotide
ggguuctccccacagaggga

SEQ ID NO: 2052 - RNA, 20 nt, Artificial Sequence
  Description of Artificial Sequence: Synthetic oligonucleotide
ggcacaagggcacagacuuc

SEQ ID NO: 2053 - RNA, 20 nt, Artificial Sequence
  Description of Artificial Sequence: Synthetic oligonucleotide
ggcacaagggcacagacuuc

SEQ ID NO: 2054 - RNA, 20 nt, Artificial Sequence
  Description of Artificial Sequence: Synthetic oligonucleotide
ggcacaagggcacagacuuc

SEQ ID NO: 2055 - RNA, 20 nt, Artificial Sequence
  Description of Artificial Sequence: Synthetic oligonucleotide
ggcacaagggcacagacuuc

SEQ ID NO: 2056 - RNA, 20 nt, Artificial Sequence
  Description of Artificial Sequence: Synthetic oligonucleotide
ggcacaagggcacagacuuc

SEQ ID NO: 2057 - RNA, 20 nt, Artificial Sequence
  Description of Artificial Sequence: Synthetic oligonucleotide
ggcacaagggcacagacuuc

SEQ ID NO: 2058 - RNA, 20 nt, Artificial Sequence
  Description of Artificial Sequence: Synthetic oligonucleotide
ggcacaagggcacagacuuc

SEQ ID NO: 2059 - RNA, 20 nt, Artificial Sequence
  Description of Artificial Sequence: Synthetic oligonucleotide
ggcacaagggcacagacuuc

SEQ ID NO: 2060 - RNA, 20 nt, Artificial Sequence
  Description of Artificial Sequence: Synthetic oligonucleotide
ggcacaagggcacagacuuc

SEQ ID NO: 2061 - RNA, 20 nt, Artificial Sequence
  Description of Artificial Sequence: Synthetic oligonucleotide
ggcacaagggcacagacuuc

SEQ ID NO: 2062 - RNA, 20 nt, Artificial Sequence
  Description of Artificial Sequence: Synthetic oligonucleotide
ggcacaagggcacagacuuc

SEQ ID NO: 2063 - RNA, 20 nt, Artificial Sequence
  Description of Artificial Sequence: Synthetic oligonucleotide
ggcacaagggcacagacuuc

SEQ ID NO: 2064 - RNA, 20 nt, Artificial Sequence
  Description of Artificial Sequence: Synthetic oligonucleotide
ggcacaagggcacagacuuc

SEQ ID NO: 2065 - DNA, 20 bp, Artificial Sequence
  Description of Artificial Sequence: Synthetic oligonucleotide
attaataaattgtcatcacc

SEQ ID NO: 2066 - DNA, 20 bp, Artificial Sequence
  Description of Artificial Sequence: Synthetic oligonucleotide
attaataaattgtcatcacc

SEQ ID NO: 2067 - DNA, 20 bp, Artificial Sequence
  Description of Artificial Sequence: Synthetic oligonucleotide
attaataaattgtcatcacc

SEQ ID NO: 2068 - RNA, 20 nt, Artificial Sequence
  Description of Artificial Sequence: Synthetic oligonucleotide
ggugaugacaauuuauuaau

SEQ ID NO: 2069 - RNA, 20 nt, Artificial Sequence
  Description of Artificial Sequence: Synthetic oligonucleotide
ggugauggcaauuuauuaau

SEQ ID NO: 2070 - RNA, 25 nt, Artificial Sequence
  Description of Artificial Sequence: Synthetic oligonucleotide
uuuggaagucugcgcccuugugccc

SEQ ID NO: 2071 - RNA, 25 nt, Artificial Sequence
  Description of Artificial Sequence: Synthetic oligonucleotide
uuuggaagucugugcccuugugccc

SEQ ID NO: 2072 - DNA, 20 bp, Artificial Sequence
  Description of Artificial Sequence: Synthetic oligonucleotide
gggcacaagggcacagactt

SEQ ID NO: 2073 - DNA, 20 bp, Artificial Sequence
  Description of Artificial Sequence: Synthetic oligonucleotide
ggcacaagggcacagacttc

SEQ ID NO: 2074 - DNA, 20 bp, Artificial Sequence
  Description of Artificial Sequence: Synthetic oligonucleotide
gcacaagggcacagacttcc

SEQ ID NO: 2075 - DNA, 20 bp, Artificial Sequence
  Description of Artificial Sequence: Synthetic oligonucleotide
cacaagggcacagacttcca

SEQ ID NO: 2076 - DNA, 20 bp, Artificial Sequence
  Description of Artificial Sequence: Synthetic oligonucleotide
acaagggcacagacttccaa

SEQ ID NO: 2077 - DNA, 20 bp, Artificial Sequence
  Description of Artificial Sequence: Synthetic oligonucleotide
caagggcacagacttccaaa

SEQ ID NO: 2078 - DNA, 20 bp, Artificial Sequence
  Description of Artificial Sequence: Synthetic oligonucleotide
gggcacaagggcacagactt

SEQ ID NO: 2079 - DNA, 20 bp, Artificial Sequence
  Description of Artificial Sequence: Synthetic oligonucleotide
ggcacaagggcacagacttc

SEQ ID NO: 2080 - DNA, 20 bp, Artificial Sequence
  Description of Artificial Sequence: Synthetic oligonucleotide
gcacaagggcacagacttcc

SEQ ID NO: 2081 - DNA, 20 bp, Artificial Sequence
  Description of Artificial Sequence: Synthetic oligonucleotide
cacaagggcacagacttcca

SEQ ID NO: 2082 - DNA, 20 bp, Artificial Sequence
  Description of Artificial Sequence: Synthetic oligonucleotide
acaagggcacagacttccaa

SEQ ID NO: 2083 - DNA, 20 bp, Artificial Sequence
  Description of Artificial Sequence: Synthetic oligonucleotide
caagggcacagacttccaaa

SEQ ID NO: 2084 - RNA, 20 nt, Artificial Sequence
  Description of Artificial Sequence: Synthetic oligonucleotide
gggcacaagggcacagacuu

SEQ ID NO: 2085 - RNA, 20 nt, Artificial Sequence
  Description of Artificial Sequence: Synthetic oligonucleotide
ggcacaagggcacagacuuc

SEQ ID NO: 2086 - RNA, 20 nt, Artificial Sequence
  Description of Artificial Sequence: Synthetic oligonucleotide
gcacaagggcacagacuucc

SEQ ID NO: 2087 - RNA, 20 nt, Artificial Sequence
  Description of Artificial Sequence: Synthetic oligonucleotide
cacaagggcacagacuucca

SEQ ID NO: 2088 - DNA, 20 bp, Artificial Sequence
  Description of Artificial Sequence: Synthetic oligonucleotide
  Description of Combined DNA/RNA Molecule: Synthetic oligonucleotide
acaagggcacagactuccaa

SEQ ID NO: 2089 - DNA, 20 bp, Artificial Sequence
  Description of Artificial Sequence: Synthetic oligonucleotide
caagggcacagacttccaaa

SEQ ID NO: 2090 - RNA, 20 nt, Artificial Sequence
  Description of Artificial Sequence: Synthetic oligonucleotide
gcacaagggcacagacuucc

SEQ ID NO: 2091 - RNA, 20 nt, Artificial Sequence
  Description of Artificial Sequence: Synthetic oligonucleotide
cacaagggcacagacuucca

SEQ ID NO: 2092 - RNA, 20 nt, Artificial Sequence
  Description of Artificial Sequence: Synthetic oligonucleotide
acaagggcacagacuuccaa

SEQ ID NO: 2093 - RNA, 20 nt, Artificial Sequence
  Description of Artificial Sequence: Synthetic oligonucleotide
caagggcacagacuuccaaa

SEQ ID NO: 2094 - RNA, 20 nt, Artificial Sequence
  Description of Artificial Sequence: Synthetic oligonucleotide
gcacaagggcacagacuucc

SEQ ID NO: 2095 - RNA, 20 nt, Artificial Sequence
  Description of Artificial Sequence: Synthetic oligonucleotide
cacaagggcacagacuucca

SEQ ID NO: 2096 - RNA, 20 nt, Artificial Sequence
  Description of Artificial Sequence: Synthetic oligonucleotide
acaagggcacagacuuccaa

SEQ ID NO: 2097 - RNA, 20 nt, Artificial Sequence
  Description of Artificial Sequence: Synthetic oligonucleotide
caagggcacagacuuccaaa

SEQ ID NO: 2098 - RNA, 20 nt, Artificial Sequence
  Description of Artificial Sequence: Synthetic oligonucleotide
gggcacaagggcacagacuu

SEQ ID NO: 2099 - RNA, 20 nt, Artificial Sequence
  Description of Artificial Sequence: Synthetic oligonucleotide
ggcacaagggcacagacuuc

SEQ ID NO: 2100 - RNA, 20 nt, Artificial Sequence
  Description of Artificial Sequence: Synthetic oligonucleotide
gcacaagggcacagacuucc

SEQ ID NO: 2101 - RNA, 20 nt, Artificial Sequence
  Description of Artificial Sequence: Synthetic oligonucleotide
cacaagggcacagacuucca

SEQ ID NO: 2102 - DNA, 20 bp, Artificial Sequence
  Description of Artificial Sequence: Synthetic oligonucleotide
  Description of Combined DNA/RNA Molecule: Synthetic oligonucleotide
acaagggcacagactuccaa

SEQ ID NO: 2103 - DNA, 20 bp, Artificial Sequence
  Description of Artificial Sequence: Synthetic oligonucleotide
caagggcacagacttccaaa

SEQ ID NO: 2104 - DNA, 20 bp, Artificial Sequence
  Description of Artificial Sequence: Synthetic oligonucleotide
gggcacaagggcacagactt

SEQ ID NO: 2105 - DNA, 20 bp, Artificial Sequence
  Description of Artificial Sequence: Synthetic oligonucleotide
ggcacaagggcacagacttc

SEQ ID NO: 2106 - DNA, 20 bp, Artificial Sequence
  Description of Artificial Sequence: Synthetic oligonucleotide
gcacaagggcacagacttcc

SEQ ID NO: 2107 - DNA, 20 bp, Artificial Sequence
  Description of Artificial Sequence: Synthetic oligonucleotide
cacaagggcacagacttcca

SEQ ID NO: 2108 - DNA, 20 bp, Artificial Sequence
  Description of Artificial Sequence: Synthetic oligonucleotide
acaagggcacagacttccaa

SEQ ID NO: 2109 - DNA, 20 bp, Artificial Sequence
  Description of Artificial Sequence: Synthetic oligonucleotide
caagggcacagacttccaaa

SEQ ID NO: 2110 - RNA, 25 nt, Artificial Sequence
  Description of Artificial Sequence: Synthetic oligonucleotide
uuuggaagucugcgcccuugugccc

SEQ ID NO: 2111 - RNA, 25 nt, Artificial Sequence
  Description of Artificial Sequence: Synthetic oligonucleotide
uuuggaagucugugcccuugugccc

SEQ ID NO: 2112 - DNA, 20 bp, Artificial Sequence
  Description of Artificial Sequence: Synthetic oligonucleotide
gagcagctgcaacctggcaa

SEQ ID NO: 2113 - DNA, 20 bp, Artificial Sequence
  Description of Artificial Sequence: Synthetic oligonucleotide
gggccaacagccagcctgca

SEQ ID NO: 2114 - RNA, 25 nt, Artificial Sequence
  Description of Artificial Sequence: Synthetic oligonucleotide
gguuguugccagguuacagcugcuc

SEQ ID NO: 2115 - RNA, 25 nt, Artificial Sequence
  Description of Artificial Sequence: Synthetic oligonucleotide
gguuguugccagguugcagcugcuc

SEQ ID NO: 2116 - DNA, 20 bp, Artificial Sequence
  Description of Artificial Sequence: Synthetic oligonucleotide
gagcagctgcaacctggcaa

SEQ ID NO: 2117 - DNA, 20 bp, Artificial Sequence
  Description of Artificial Sequence: Synthetic oligonucleotide
agcagctgcaacctggcaac

SEQ ID NO: 2118 - DNA, 20 bp, Artificial Sequence
  Description of Artificial Sequence: Synthetic oligonucleotide
gcagctgcaacctggcaaca

SEQ ID NO: 2119 - DNA, 20 bp, Artificial Sequence
  Description of Artificial Sequence: Synthetic oligonucleotide
cagctgcaacctggcaacaa

SEQ ID NO: 2120 - DNA, 20 bp, Artificial Sequence
  Description of Artificial Sequence: Synthetic oligonucleotide
agctgcaacctggcaacaac

SEQ ID NO: 2121 - DNA, 20 bp, Artificial Sequence
  Description of Artificial Sequence: Synthetic oligonucleotide
gctgcaacctggcaacaacc

SEQ ID NO: 2122 - RNA, 25 nt, Artificial Sequence
  Description of Artificial Sequence: Synthetic oligonucleotide
ccuccugcaggcuggguguuggccc

SEQ ID NO: 2123 - RNA, 25 nt, Artificial Sequence
  Description of Artificial Sequence: Synthetic oligonucleotide
ccuccugcaggcuggcuguuggccc

SEQ ID NO: 2124 - DNA, 20 bp, Artificial Sequence
  Description of Artificial Sequence: Synthetic oligonucleotide
gggccaacagccagcctgca

SEQ ID NO: 2125 - DNA, 20 bp, Artificial Sequence
  Description of Artificial Sequence: Synthetic oligonucleotide
ggccaacagccagcctgcag

SEQ ID NO: 2126 - DNA, 20 bp, Artificial Sequence
  Description of Artificial Sequence: Synthetic oligonucleotide
gccaacagccagcctgcagg

SEQ ID NO: 2127 - DNA, 20 bp, Artificial Sequence
  Description of Artificial Sequence: Synthetic oligonucleotide
ccaacagccagcctgcagga

SEQ ID NO: 2128 - DNA, 20 bp, Artificial Sequence
  Description of Artificial Sequence: Synthetic oligonucleotide
caacagccagcctgcaggag

SEQ ID NO: 2129 - DNA, 20 bp, Artificial Sequence
  Description of Artificial Sequence: Synthetic oligonucleotide
aacagccagcctgcaggagg

SEQ ID NO: 2130 - DNA, 21 bp, Artificial Sequence
  Description of Artificial Sequence: Synthetic oligonucleotide
  Description of Combined DNA/RNA Molecule: Synthetic oligonucleotide
ggccuuucacuacuccuactt

SEQ ID NO: 2131 - DNA, 21 bp, Artificial Sequence
  Description of Artificial Sequence: Synthetic oligonucleotide
  Description of Combined DNA/RNA Molecule: Synthetic oligonucleotide
guaggaguagugaaaggcctt

SEQ ID NO: 2132 - DNA, 20 bp, Artificial Sequence
  Description of Artificial Sequence: Synthetic oligonucleotide
gtaggagtagtgaaaggcca

SEQ ID NO: 2133 - DNA, 20 bp, Artificial Sequence
  Description of Artificial Sequence: Synthetic oligonucleotide
gcagggcacaagggcacaga

SEQ ID NO: 2134 - DNA, 20 bp, Artificial Sequence
  Description of Artificial Sequence: Synthetic oligonucleotide
cagggcacaagggcacagac

SEQ ID NO: 2135 - DNA, 20 bp, Artificial Sequence
  Description of Artificial Sequence: Synthetic oligonucleotide
agggcacaagggcacagact

SEQ ID NO: 2136 - DNA, 20 bp, Artificial Sequence
  Description of Artificial Sequence: Synthetic oligonucleotide
aagggcacagacttccaaag

SEQ ID NO: 2137 - DNA, 20 bp, Artificial Sequence
  Description of Artificial Sequence: Synthetic oligonucleotide
agggcacagacttccaaagg

SEQ ID NO: 2138 - DNA, 20 bp, Artificial Sequence
  Description of Artificial Sequence: Synthetic oligonucleotide
gggcacagacttccaaaggc

SEQ ID NO: 2139 - DNA, 20 bp, Artificial Sequence
  Description of Artificial Sequence: Synthetic oligonucleotide
gagcagctgcaacctggcaa

SEQ ID NO: 2140 - DNA, 20 bp, Artificial Sequence
  Description of Artificial Sequence: Synthetic oligonucleotide
agcagctgcaacctggcaac

SEQ ID NO: 2141 - DNA, 20 bp, Artificial Sequence
  Description of Artificial Sequence: Synthetic oligonucleotide
gcagctgcaacctggcaaca

SEQ ID NO: 2142 - DNA, 20 bp, Artificial Sequence
  Description of Artificial Sequence: Synthetic oligonucleotide
cagctgcaacctggcaacaa

SEQ ID NO: 2143 - DNA, 20 bp, Artificial Sequence
  Description of Artificial Sequence: Synthetic oligonucleotide
agctgcaacctggcaacaac

SEQ ID NO: 2144 - DNA, 20 bp, Artificial Sequence
  Description of Artificial Sequence: Synthetic oligonucleotide
gctgcaacctggcaacaacc

SEQ ID NO: 2145 - DNA, 20 bp, Artificial Sequence
  Description of Artificial Sequence: Synthetic oligonucleotide
gagcagctgcaacctggcaa

SEQ ID NO: 2146 - DNA, 20 bp, Artificial Sequence
  Description of Artificial Sequence: Synthetic oligonucleotide
agcagctgcaacctggcaac

SEQ ID NO: 2147 - DNA, 20 bp, Artificial Sequence
  Description of Artificial Sequence: Synthetic oligonucleotide
gcagctgcaacctggcaaca

SEQ ID NO: 2148 - DNA, 20 bp, Artificial Sequence
  Description of Artificial Sequence: Synthetic oligonucleotide
  Description of Combined DNA/RNA Molecule: Synthetic oligonucleotide
cagcugcaacctggcaacaa

SEQ ID NO: 2149 - DNA, 20 bp, Artificial Sequence
  Description of Artificial Sequence: Synthetic oligonucleotide
  Description of Combined DNA/RNA Molecule: Synthetic oligonucleotide
agcugcaacctggcaacaac

SEQ ID NO: 2150 - DNA, 20 bp, Artificial Sequence
  Description of Artificial Sequence: Synthetic oligonucleotide
  Description of Combined DNA/RNA Molecule: Synthetic oligonucleotide
gcugcaacctggcaacaacc

SEQ ID NO: 2151 - DNA, 20 bp, Artificial Sequence
  Description of Artificial Sequence: Synthetic oligonucleotide
gagcagctgcaacctggcaa

SEQ ID NO: 2152 - DNA, 20 bp, Artificial Sequence
  Description of Artificial Sequence: Synthetic oligonucleotide
agcagctgcaacctggcaac

SEQ ID NO: 2153 - DNA, 20 bp, Artificial Sequence
  Description of Artificial Sequence: Synthetic oligonucleotide
gcagctgcaacctggcaaca

SEQ ID NO: 2154 - DNA, 20 bp, Artificial Sequence
  Description of Artificial Sequence: Synthetic oligonucleotide
  Description of Combined DNA/RNA Molecule: Synthetic oligonucleotide
cagcugcaacctggcaacaa

SEQ ID NO: 2155 - DNA, 20 bp, Artificial Sequence
  Description of Artificial Sequence: Synthetic oligonucleotide
  Description of Combined DNA/RNA Molecule: Synthetic oligonucleotide
agcugcaacctggcaacaac

SEQ ID NO: 2156 - DNA, 20 bp, Artificial Sequence
  Description of Artificial Sequence: Synthetic oligonucleotide
  Description of Combined DNA/RNA Molecule: Synthetic oligonucleotide
gcugcaacctggcaacaacc

SEQ ID NO: 2157 - DNA, 20 bp, Artificial Sequence
  Description of Artificial Sequence: Synthetic oligonucleotide
  Description of Combined DNA/RNA Molecule: Synthetic oligonucleotide
gagcagctgcaaccuggcaa

SEQ ID NO: 2158 - DNA, 20 bp, Artificial Sequence
  Description of Artificial Sequence: Synthetic oligonucleotide
  Description of Combined DNA/RNA Molecule: Synthetic oligonucleotide
gagcagctgcaaccuggcaa

SEQ ID NO: 2159 - DNA, 20 bp, Artificial Sequence
  Description of Artificial Sequence: Synthetic oligonucleotide
agcagctgcaacctggcaac

SEQ ID NO: 2160 - DNA, 20 bp, Artificial Sequence
  Description of Artificial Sequence: Synthetic oligonucleotide
agcagctgcaacctggcaac

SEQ ID NO: 2161 - DNA, 20 bp, Artificial Sequence
  Description of Artificial Sequence: Synthetic oligonucleotide
  Description of Combined DNA/RNA Molecule: Synthetic oligonucleotide
gcagctgcaaccuggcaaca

SEQ ID NO: 2162 - DNA, 20 bp, Artificial Sequence
  Description of Artificial Sequence: Synthetic oligonucleotide
  Description of Combined DNA/RNA Molecule: Synthetic oligonucleotide
gcagctgcaaccuggcaaca

SEQ ID NO: 2163 - DNA, 20 bp, Artificial Sequence
  Description of Artificial Sequence: Synthetic oligonucleotide
gagcagctgcaacctggcaa

SEQ ID NO: 2164 - DNA, 20 bp, Artificial Sequence
  Description of Artificial Sequence: Synthetic oligonucleotide
agcagctgcaacctggcaac

SEQ ID NO: 2165 - DNA, 20 bp, Artificial Sequence
  Description of Artificial Sequence: Synthetic oligonucleotide
gcagctgcaacctggcaaca

SEQ ID NO: 2166 - DNA, 20 bp, Artificial Sequence
  Description of Artificial Sequence: Synthetic oligonucleotide
  Description of Combined DNA/RNA Molecule: Synthetic oligonucleotide
cagcugcaacctggcaacaa

SEQ ID NO: 2167 - DNA, 20 bp, Artificial Sequence
  Description of Artificial Sequence: Synthetic oligonucleotide
  Description of Combined DNA/RNA Molecule: Synthetic oligonucleotide
agcugcaacctggcaacaac

SEQ ID NO: 2168 - DNA, 20 bp, Artificial Sequence
  Description of Artificial Sequence: Synthetic oligonucleotide
  Description of Combined DNA/RNA Molecule: Synthetic oligonucleotide
gcugcaacctggcaacaacc

SEQ ID NO: 2169 - DNA, 20 bp, Artificial Sequence
  Description of Artificial Sequence: Synthetic oligonucleotide
gggccaacagccagcctgca

SEQ ID NO: 2170 - DNA, 20 bp, Artificial Sequence
  Description of Artificial Sequence: Synthetic oligonucleotide
ggccaacagccagcctgcag

SEQ ID NO: 2171 - DNA, 20 bp, Artificial Sequence
  Description of Artificial Sequence: Synthetic oligonucleotide
gccaacagccagcctgcagg

SEQ ID NO: 2172 - DNA, 20 bp, Artificial Sequence
  Description of Artificial Sequence: Synthetic oligonucleotide
ccaacagccagcctgcagga

SEQ ID NO: 2173 - DNA, 20 bp, Artificial Sequence
  Description of Artificial Sequence: Synthetic oligonucleotide
caacagccagcctgcaggag

SEQ ID NO: 2174 - DNA, 20 bp, Artificial Sequence
  Description of Artificial Sequence: Synthetic oligonucleotide
aacagccagcctgcaggagg

SEQ ID NO: 2175 - DNA, 20 bp, Artificial Sequence
  Description of Artificial Sequence: Synthetic oligonucleotide
gggccaacagccagcctgca

SEQ ID NO: 2176 - DNA, 20 bp, Artificial Sequence
  Description of Artificial Sequence: Synthetic oligonucleotide
ggccaacagccagcctgcag

SEQ ID NO: 2177 - DNA, 20 bp, Artificial Sequence
  Description of Artificial Sequence: Synthetic oligonucleotide
gccaacagccagcctgcagg

SEQ ID NO: 2178 - DNA, 20 bp, Artificial Sequence
  Description of Artificial Sequence: Synthetic oligonucleotide
ccaacagccagcctgcagga

SEQ ID NO: 2179 - DNA, 20 bp, Artificial Sequence
  Description of Artificial Sequence: Synthetic oligonucleotide
caacagccagcctgcaggag

SEQ ID NO: 2180 - DNA, 20 bp, Artificial Sequence
  Description of Artificial Sequence: Synthetic oligonucleotide
aacagccagcctgcaggagg

SEQ ID NO: 2181 - RNA, 20 nt, Artificial Sequence
  Description of Artificial Sequence: Synthetic oligonucleotide
gggccaacagccagccugca

SEQ ID NO: 2182 - RNA, 20 nt, Artificial Sequence
  Description of Artificial Sequence: Synthetic oligonucleotide
ggccaacagccagccugcag

SEQ ID NO: 2183 - DNA, 20 bp, Artificial Sequence
  Description of Artificial Sequence: Synthetic oligonucleotide
gccaacagccagcctgcagg

SEQ ID NO: 2184 - DNA, 20 bp, Artificial Sequence
  Description of Artificial Sequence: Synthetic oligonucleotide
ccaacagccagcctgcagga

SEQ ID NO: 2185 - DNA, 20 bp, Artificial Sequence
  Description of Artificial Sequence: Synthetic oligonucleotide
caacagccagcctgcaggag

SEQ ID NO: 2186 - DNA, 20 bp, Artificial Sequence
  Description of Artificial Sequence: Synthetic oligonucleotide
aacagccagcctgcaggagg

SEQ ID NO: 2187 - RNA, 20 nt, Artificial Sequence
  Description of Artificial Sequence: Synthetic oligonucleotide
gggccaacagccagccugca

SEQ ID NO: 2188 - RNA, 20 nt, Artificial Sequence
  Description of Artificial Sequence: Synthetic oligonucleotide
gggccaacagccagccugca

SEQ ID NO: 2189 - RNA, 20 nt, Artificial Sequence
  Description of Artificial Sequence: Synthetic oligonucleotide
ggccaacagccagccugcag

SEQ ID NO: 2190 - RNA, 20 nt, Artificial Sequence
  Description of Artificial Sequence: Synthetic oligonucleotide
ggccaacagccagccugcag

SEQ ID NO: 2191 - RNA, 20 nt, Artificial Sequence
  Description of Artificial Sequence: Synthetic oligonucleotide
gccaacagccagccugcagg

SEQ ID NO: 2192 - RNA, 20 nt, Artificial Sequence
  Description of Artificial Sequence: Synthetic oligonucleotide
gccaacagccagccugcagg

SEQ ID NO: 2193 - RNA, 20 nt, Artificial Sequence
  Description of Artificial Sequence: Synthetic oligonucleotide
gggccaacagccagccugca

SEQ ID NO: 2194 - RNA, 20 nt, Artificial Sequence
  Description of Artificial Sequence: Synthetic oligonucleotide
ggccaacagccagccugcag

SEQ ID NO: 2195 - DNA, 20 bp, Artificial Sequence
  Description of Artificial Sequence: Synthetic oligonucleotide
gccaacagccagcctgcagg

SEQ ID NO: 2196 - DNA, 20 bp, Artificial Sequence
  Description of Artificial Sequence: Synthetic oligonucleotide
ccaacagccagcctgcagga

SEQ ID NO: 2197 - DNA, 20 bp, Artificial Sequence
  Description of Artificial Sequence: Synthetic oligonucleotide
caacagccagcctgcaggag

SEQ ID NO: 2198 - DNA, 20 bp, Artificial Sequence
  Description of Artificial Sequence: Synthetic oligonucleotide
aacagccagcctgcaggagg

SEQ ID NO: 2199 - DNA, 20 bp, Artificial Sequence
  Description of Artificial Sequence: Synthetic oligonucleotide
  Description of Combined DNA/RNA Molecule: Synthetic oligonucleotide
guaggagtagtgaaaggcca

SEQ ID NO: 2200 - DNA, 20 bp, Artificial Sequence
  Description of Artificial Sequence: Synthetic oligonucleotide
  Description of Combined DNA/RNA Molecule: Synthetic oligonucleotide
guaggagtagtgaaaggcca

SEQ ID NO: 2201 - DNA, 20 bp, Artificial Sequence
  Description of Artificial Sequence: Synthetic oligonucleotide
  Description of Combined DNA/RNA Molecule: Synthetic oligonucleotide
guaggagtagtgaaaggcca

SEQ ID NO: 2202 - DNA, 20 bp, Artificial Sequence
  Description of Artificial Sequence: Synthetic oligonucleotide
  Description of Combined DNA/RNA Molecule: Synthetic oligonucleotide
cucuuactgtgctgtggaca

SEQ ID NO: 2203 - DNA, 20 bp, Artificial Sequence
  Description of Artificial Sequence: Synthetic oligonucleotide
  Description of Combined DNA/RNA Molecule: Synthetic oligonucleotide
cucuuactgtgctgtggaca

SEQ ID NO: 2204 - DNA, 20 bp, Artificial Sequence
  Description of Artificial Sequence: Synthetic oligonucleotide
  Description of Combined DNA/RNA Molecule: Synthetic oligonucleotide
cucuuactgtgctgtggaca

SEQ ID NO: 2205 - DNA, 20 bp, Artificial Sequence
  Description of Artificial Sequence: Synthetic oligonucleotide
gggcacaagggcacagactt

SEQ ID NO: 2206 - DNA, 20 bp, Artificial Sequence
  Description of Artificial Sequence: Synthetic oligonucleotide
ggcacaagggcacagacttc

SEQ ID NO: 2207 - DNA, 20 bp, Artificial Sequence
  Description of Artificial Sequence: Synthetic oligonucleotide
gcacaagggcacagacttcc

SEQ ID NO: 2208 - DNA, 20 bp, Artificial Sequence
  Description of Artificial Sequence: Synthetic oligonucleotide
gggcacaagggcacagactt

SEQ ID NO: 2209 - DNA, 20 bp, Artificial Sequence
  Description of Artificial Sequence: Synthetic oligonucleotide
ggcacaagggcacagacttc

SEQ ID NO: 2210 - DNA, 20 bp, Artificial Sequence
  Description of Artificial Sequence: Synthetic oligonucleotide
gcacaagggcacagacttcc

SEQ ID NO: 2211 - RNA, 35 nt, Artificial Sequence; identical to SEQ ID NO: 1859
  Description of Artificial Sequence: Synthetic oligonucleotide

SEQ ID NO: 2212 - RNA, 35 nt, Artificial Sequence; identical to SEQ ID NO: 1860
  Description of Artificial Sequence: Synthetic oligonucleotide

SEQ ID NO: 2213 - RNA, 21 nt, Artificial Sequence
  Description of Artificial Sequence: Synthetic oligonucleotide
cacacgggcacagacuuccaa

SEQ ID NO: 2214 - RNA, 21 nt, Artificial Sequence
  Description of Artificial Sequence: Synthetic oligonucleotide
ggaagucugugcccgugugcc

SEQ ID NO: 2215 - DNA, 20 bp, Artificial Sequence
  Description of Artificial Sequence: Synthetic oligonucleotide
  Description of Combined DNA/RNA Molecule: Synthetic oligonucleotide
auuaauaaattgtcatcacc

SEQ ID NO: 2216 - DNA, 20 bp, Artificial Sequence
  Description of Artificial Sequence: Synthetic oligonucleotide
  Description of Combined DNA/RNA Molecule: Synthetic oligonucleotide
auuaauaaattgtcatcacc

SEQ ID NO: 2217 - DNA, 20 bp, Artificial Sequence
  Description of Artificial Sequence: Synthetic oligonucleotide
  Description of Combined DNA/RNA Molecule: Synthetic oligonucleotide
auuaauaaattgtcatcacc

SEQ ID NO: 2218 - DNA, 20 bp, Artificial Sequence
  Description of Artificial Sequence: Synthetic oligonucleotide
  Description of Combined DNA/RNA Molecule: Synthetic oligonucleotide
auuaauaaattgtcatcacc

SEQ ID NO: 2219 - DNA, 20 bp, Artificial Sequence
  Description of Artificial Sequence: Synthetic oligonucleotide
  Description of Combined DNA/RNA Molecule: Synthetic oligonucleotide
auuaauaaattgtcatcacc

SEQ ID NO: 2220 - DNA, 20 bp, Artificial Sequence
  Description of Artificial Sequence: Synthetic oligonucleotide
  Description of Combined DNA/RNA Molecule: Synthetic oligonucleotide
auuaauaaattgtcatcacc

SEQ ID NO: 2221 - DNA, 20 bp, Artificial Sequence
  Description of Artificial Sequence: Synthetic oligonucleotide
  Description of Combined DNA/RNA Molecule: Synthetic oligonucleotide
auuaauaaattgtcatcacc

SEQ ID NO: 2222 - DNA, 20 bp, Artificial Sequence
  Description of Artificial Sequence: Synthetic oligonucleotide
  Description of Combined DNA/RNA Molecule: Synthetic oligonucleotide
auuaauaaattgtcatcacc

SEQ ID NO: 2223 - RNA, 20 nt, Artificial Sequence
  Description of Artificial Sequence: Synthetic oligonucleotide
ggcacaagggcacagacuuc

SEQ ID NO: 2224 - RNA, 20 nt, Artificial Sequence
  Description of Artificial Sequence: Synthetic oligonucleotide
ggcacaagggcacagacuuc

SEQ ID NO: 2225 - RNA, 20 nt, Artificial Sequence
  Description of Artificial Sequence: Synthetic oligonucleotide
ggcacaagggcacagacuuc

SEQ ID NO: 2226 - DNA, 20 bp, Artificial Sequence
  Description of Artificial Sequence: Synthetic oligonucleotide
ggcacaagggcacagacttc

SEQ ID NO: 2227 - DNA, 20 bp, Artificial Sequence
  Description of Artificial Sequence: Synthetic oligonucleotide
ggcacaagggcacagacttc

SEQ ID NO: 2228 - DNA, 20 bp, Artificial Sequence
  Description of Artificial Sequence: Synthetic oligonucleotide
ggcacaagggcacagacttc

SEQ ID NO: 2229 - RNA, 20 nt, Artificial Sequence
  Description of Artificial Sequence: Synthetic oligonucleotide
ggcacaagggcacagacuuc

SEQ ID NO: 2230 - RNA, 20 nt, Artificial Sequence
  Description of Artificial Sequence: Synthetic oligonucleotide
ggcacaagggcacagacuuc

SEQ ID NO: 2231 - DNA, 20 bp, Artificial Sequence
  Description of Artificial Sequence: Synthetic oligonucleotide
gcagggcacaagggcacaga

SEQ ID NO: 2232 - DNA, 20 bp, Artificial Sequence
  Description of Artificial Sequence: Synthetic oligonucleotide
gcagggcacaagggcacaga

SEQ ID NO: 2233 - DNA, 20 bp, Artificial Sequence
  Description of Artificial Sequence: Synthetic oligonucleotide
gcagggcacaagggcacaga

SEQ ID NO: 2234 - DNA, 20 bp, Artificial Sequence
  Description of Artificial Sequence: Synthetic oligonucleotide
gcagggcacaagggcacaga

SEQ ID NO: 2235 - DNA, 20 bp, Artificial Sequence
  Description of Artificial Sequence: Synthetic oligonucleotide
gcagggcacaagggcacaga

SEQ ID NO: 2236 - DNA, 20 bp, Artificial Sequence
  Description of Artificial Sequence: Synthetic oligonucleotide
cagggcacaagggcacagac

SEQ ID NO: 2237 - DNA, 20 bp, Artificial Sequence
  Description of Artificial Sequence: Synthetic oligonucleotide
cagggcacaagggcacagac

SEQ ID NO: 2238 - DNA, 20 bp, Artificial Sequence
  Description of Artificial Sequence: Synthetic oligonucleotide
cagggcacaagggcacagac

SEQ ID NO: 2239 - DNA, 20 bp, Artificial Sequence
  Description of Artificial Sequence: Synthetic oligonucleotide
cagggcacaagggcacagac

SEQ ID NO: 2240 - DNA, 20 bp, Artificial Sequence
  Description of Artificial Sequence: Synthetic oligonucleotide
cagggcacaagggcacagac

SEQ ID NO: 2241 - DNA, 20 bp, Artificial Sequence
  Description of Artificial Sequence: Synthetic oligonucleotide
agggcacaagggcacagact

SEQ ID NO: 2242 - DNA, 20 bp, Artificial Sequence
  Description of Artificial Sequence: Synthetic oligonucleotide
agggcacaagggcacagact

SEQ ID NO: 2243 - DNA, 20 bp, Artificial Sequence
  Description of Artificial Sequence: Synthetic oligonucleotide
agggcacaagggcacagact

SEQ ID NO: 2244 - RNA, 20 nt, Artificial Sequence
  Description of Artificial Sequence: Synthetic oligonucleotide
agggcacaagggcacagacu

SEQ ID NO: 2245 - RNA, 20 nt, Artificial Sequence
  Description of Artificial Sequence: Synthetic oligonucleotide
agggcacaagggcacagacu

SEQ ID NO: 2246 - DNA, 20 bp, Artificial Sequence
  Description of Artificial Sequence: Synthetic oligonucleotide
aagggcacagacttccaaag

SEQ ID NO: 2247 - DNA, 20 bp, Artificial Sequence
  Description of Artificial Sequence: Synthetic oligonucleotide
aagggcacagacttccaaag

SEQ ID NO: 2248 - DNA, 20 bp, Artificial Sequence
  Description of Artificial Sequence: Synthetic oligonucleotide
aagggcacagacttccaaag

SEQ ID NO: 2249 - DNA, 20 bp, Artificial Sequence
  Description of Artificial Sequence: Synthetic oligonucleotide
aagggcacagacttccaaag

SEQ ID NO: 2250 - DNA, 20 bp, Artificial Sequence
  Description of Artificial Sequence: Synthetic oligonucleotide
aagggcacagacttccaaag

SEQ ID NO: 2251 - DNA, 20 bp, Artificial Sequence
  Description of Artificial Sequence: Synthetic oligonucleotide
aagggcacagacttccaaag

SEQ ID NO: 2252 - DNA, 20 bp, Artificial Sequence
  Description of Artificial Sequence: Synthetic oligonucleotide
aagggcacagacttccaaag

SEQ ID NO: 2253 - DNA, 20 bp, Artificial Sequence
  Description of Artificial Sequence: Synthetic oligonucleotide
agggcacagacttccaaagg

SEQ ID NO: 2254 - DNA, 20 bp, Artificial Sequence
  Description of Artificial Sequence: Synthetic oligonucleotide
agggcacagacttccaaagg

SEQ ID NO: 2255 - DNA, 20 bp, Artificial Sequence
  Description of Artificial Sequence: Synthetic oligonucleotide
agggcacagacttccaaagg

SEQ ID NO: 2256 - DNA, 20 bp, Artificial Sequence
  Description of Artificial Sequence: Synthetic oligonucleotide
agggcacagacttccaaagg

SEQ ID NO: 2257 - DNA, 20 bp, Artificial Sequence
  Description of Artificial Sequence: Synthetic oligonucleotide
agggcacagacttccaaagg

SEQ ID NO: 2258 - DNA, 20 bp, Artificial Sequence
  Description of Artificial Sequence: Synthetic oligonucleotide
agggcacagacttccaaagg

SEQ ID NO: 2259 - DNA, 20 bp, Artificial Sequence
  Description of Artificial Sequence: Synthetic oligonucleotide
agggcacagacttccaaagg

SEQ ID NO: 2260 - DNA, 20 bp, Artificial Sequence
  Description of Artificial Sequence: Synthetic oligonucleotide
gggcacagacttccaaaggc

SEQ ID NO: 2261 - DNA, 20 bp, Artificial Sequence
  Description of Artificial Sequence: Synthetic oligonucleotide
gggcacagacttccaaaggc

SEQ ID NO: 2262 - DNA, 20 bp, Artificial Sequence
  Description of Artificial Sequence: Synthetic oligonucleotide
gggcacagacttccaaaggc

SEQ ID NO: 2263 - DNA, 20 bp, Artificial Sequence
  Description of Artificial Sequence: Synthetic oligonucleotide
gggcacagacttccaaaggc

SEQ ID NO: 2264 - DNA, 20 bp, Artificial Sequence
  Description of Artificial Sequence: Synthetic oligonucleotide
gggcacagacttccaaaggc

SEQ ID NO: 2265 - RNA, 20 nt, Artificial Sequence
  Description of Artificial Sequence: Synthetic oligonucleotide
ggcacaagggcacagacuuc

SEQ ID NO: 2266 - RNA, 20 nt, Artificial Sequence
  Description of Artificial Sequence: Synthetic oligonucleotide
ggcacaagggcacagacuuc

SEQ ID NO: 2267 - RNA, 20 nt, Artificial Sequence
  Description of Artificial Sequence: Synthetic oligonucleotide
ggcacaagggcacagacuuc

SEQ ID NO: 2268 - DNA, 20 bp, Artificial Sequence
  Description of Artificial Sequence: Synthetic oligonucleotide
  Description of Combined DNA/RNA Molecule: Synthetic oligonucleotide
auuaauaaattgtcatcacc

SEQ ID NO: 2269 - DNA, 20 bp, Artificial Sequence
  Description of Artificial Sequence: Synthetic oligonucleotide
  Description of Combined DNA/RNA Molecule: Synthetic oligonucleotide
auuaauaaattgtcatcacc

SEQ ID NO: 2270 - RNA, 20 nt, Artificial Sequence
  Description of Artificial Sequence: Synthetic oligonucleotide
ggcacaagggcacagacuuc

SEQ ID NO: 2271 - RNA, 20 nt, Artificial Sequence
  Description of Artificial Sequence: Synthetic oligonucleotide
ggcacaagggcacagacuuc

SEQ ID NO: 2272 - DNA, 20 bp, Artificial Sequence
  Description of Artificial Sequence: Synthetic oligonucleotide
ggcacaagggcacagacttc

SEQ ID NO: 2273 - DNA, 20 bp, Artificial Sequence
  Description of Artificial Sequence: Synthetic oligonucleotide
ggcacaagggcacagacttc

SEQ ID NO: 2274 - DNA, 20 bp, Artificial Sequence
  Description of Artificial Sequence: Synthetic oligonucleotide
ctcagtaacattgacaccac

SEQ ID NO: 2275 - DNA, 20 bp, Artificial Sequence
  Description of Artificial Sequence: Synthetic oligonucleotide
  Description of Combined DNA/RNA Molecule: Synthetic oligonucleotide
cucagtaacattgacaccac

SEQ ID NO: 2276 - RNA, 20 nt, Artificial Sequence
  Description of Artificial Sequence: Synthetic oligonucleotide
ggcacaagggcacagacuuc

SEQ ID NO: 2277 - DNA, 20 bp, Artificial Sequence
  Description of Artificial Sequence: Synthetic oligonucleotide
  Description of Combined DNA/RNA Molecule: Synthetic oligonucleotide
cucagtaacattgacaccac

SEQ ID NO: 2278 - DNA, 20 bp, Artificial Sequence
  Description of Artificial Sequence: Synthetic oligonucleotide
  Description of Combined DNA/RNA Molecule: Synthetic oligonucleotide
cucagtaacattgacaccac

SEQ ID NO: 2279 - RNA, 20 nt, Artificial Sequence
  Description of Artificial Sequence: Synthetic oligonucleotide
gaagucugugcccuugugcc

SEQ ID NO: 2280 - RNA, 20 nt, Artificial Sequence
  Description of Artificial Sequence: Synthetic oligonucleotide
ggcacaagggcacagacuuc

SEQ ID NO: 2281 - DNA, 20 bp, Artificial Sequence
  Description of Artificial Sequence: Synthetic oligonucleotide
  Description of Combined DNA/RNA Molecule: Synthetic oligonucleotide
tgtcatcaccagaaaaaguc

SEQ ID NO: 2282 - DNA, 20 bp, Artificial Sequence
  Description of Artificial Sequence: Synthetic oligonucleotide
  Description of Combined DNA/RNA Molecule: Synthetic oligonucleotide
utgtcatcaccagaaaaagu

SEQ ID NO: 2283 - DNA, 20 bp, Artificial Sequence
  Description of Artificial Sequence: Synthetic oligonucleotide
  Description of Combined DNA/RNA Molecule: Synthetic oligonucleotide
ttgtcatcaccagaaaaagu

SEQ ID NO: 2284 - DNA, 20 bp, Artificial Sequence
  Description of Artificial Sequence: Synthetic oligonucleotide
  Description of Combined DNA/RNA Molecule: Synthetic oligonucleotide
autgtcatcaccagaaaaag

SEQ ID NO: 2285 - DNA, 20 bp, Artificial Sequence
  Description of Artificial Sequence: Synthetic oligonucleotide
attgtcatcaccagaaaaag

SEQ ID NO: 2286 - DNA, 20 bp, Artificial Sequence
  Description of Artificial Sequence: Synthetic oligonucleotide
  Description of Combined DNA/RNA Molecule: Synthetic oligonucleotide
aautgtcatcaccagaaaaa

SEQ ID NO: 2287 - DNA, 20 bp, Artificial Sequence
  Description of Artificial Sequence: Synthetic oligonucleotide
aattgtcatcaccagaaaaa

SEQ ID NO: 2288 - DNA, 20 bp, Artificial Sequence
  Description of Artificial Sequence: Synthetic oligonucleotide
aaattgtcatcaccagaaaa

SEQ ID NO: 2289 - DNA, 20 bp, Artificial Sequence
  Description of Artificial Sequence: Synthetic oligonucleotide
  Description of Combined DNA/RNA Molecule: Synthetic oligonucleotide
aaautgtcatcaccagaaaa

SEQ ID NO: 2290 - DNA, 20 bp, Artificial Sequence
  Description of Artificial Sequence: Synthetic oligonucleotide
  Description of Combined DNA/RNA Molecule: Synthetic oligonucleotide
uaaautgtcatcaccagaaa

SEQ ID NO: 2291 - DNA, 20 bp, Artificial Sequence
  Description of Artificial Sequence: Synthetic oligonucleotide
  Description of Combined DNA/RNA Molecule: Synthetic oligonucleotide
uaaautgtcatcaccagaaa

SEQ ID NO: 2292 - DNA, 20 bp, Artificial Sequence
  Description of Artificial Sequence: Synthetic oligonucleotide
  Description of Combined DNA/RNA Molecule: Synthetic oligonucleotide
auaaattgtcatcaccagaa

SEQ ID NO: 2293 - DNA, 20 bp, Artificial Sequence
  Description of Artificial Sequence: Synthetic oligonucleotide
  Description of Combined DNA/RNA Molecule: Synthetic oligonucleotide
auaaattgtcatcaccagaa

SEQ ID NO: 2294 - DNA, 20 bp, Artificial Sequence
  Description of Artificial Sequence: Synthetic oligonucleotide
  Description of Combined DNA/RNA Molecule: Synthetic oligonucleotide
aauaaattgtcatcaccaga

SEQ ID NO: 2295 - DNA, 20 bp, Artificial Sequence
  Description of Artificial Sequence: Synthetic oligonucleotide
  Description of Combined DNA/RNA Molecule: Synthetic oligonucleotide
aauaaattgtcatcaccaga

SEQ ID NO: 2296 - DNA, 20 bp, Artificial Sequence
  Description of Artificial Sequence: Synthetic oligonucleotide
  Description of Combined DNA/RNA Molecule: Synthetic oligonucleotide
aauaaattgtcatcaccaga

SEQ ID NO: 2297 - DNA, 20 bp, Artificial Sequence
  Description of Artificial Sequence: Synthetic oligonucleotide
  Description of Combined DNA/RNA Molecule: Synthetic oligonucleotide
uaauaaattgtcatcaccag

SEQ ID NO: 2298 - DNA, 20 bp, Artificial Sequence
  Description of Artificial Sequence: Synthetic oligonucleotide
  Description of Combined DNA/RNA Molecule: Synthetic oligonucleotide
uaauaaattgtcatcaccag

SEQ ID NO: 2299 - DNA, 20 bp, Artificial Sequence
  Description of Artificial Sequence: Synthetic oligonucleotide
  Description of Combined DNA/RNA Molecule: Synthetic oligonucleotide
uaauaaattgtcatcaccag

SEQ ID NO: 2300 - DNA, 20 bp, Artificial Sequence
  Description of Artificial Sequence: Synthetic oligonucleotide
  Description of Combined DNA/RNA Molecule: Synthetic oligonucleotide
uaauaaattgtcatcaccag

SEQ ID NO: 2301 - DNA, 20 bp, Artificial Sequence
  Description of Artificial Sequence: Synthetic oligonucleotide
  Description of Combined DNA/RNA Molecule: Synthetic oligonucleotide
uuaauaaattgtcatcacca

SEQ ID NO: 2302 - DNA, 20 bp, Artificial Sequence
  Description of Artificial Sequence: Synthetic oligonucleotide
  Description of Combined DNA/RNA Molecule: Synthetic oligonucleotide
uuaauaaattgtcatcacca

SEQ ID NO: 2303 - DNA, 20 bp, Artificial Sequence
  Description of Artificial Sequence: Synthetic oligonucleotide
  Description of Combined DNA/RNA Molecule: Synthetic oligonucleotide
uuaauaaattgtcatcacca

SEQ ID NO: 2304 - DNA, 20 bp, Artificial Sequence
  Description of Artificial Sequence: Synthetic oligonucleotide
  Description of Combined DNA/RNA Molecule: Synthetic oligonucleotide
uuaauaaattgtcatcacca

SEQ ID NO: 2305 - DNA, 20 bp, Artificial Sequence
  Description of Artificial Sequence: Synthetic oligonucleotide
  Description of Combined DNA/RNA Molecule: Synthetic oligonucleotide
auuaataaattgtcatcacc

SEQ ID NO: 2306 - DNA, 20 bp, Artificial Sequence
  Description of Artificial Sequence: Synthetic oligonucleotide
  Description of Combined DNA/RNA Molecule: Synthetic oligonucleotide
auuaataaattgtcatcacc

SEQ ID NO: 2307 - DNA, 20 bp, Artificial Sequence
  Description of Artificial Sequence: Synthetic oligonucleotide
  Description of Combined DNA/RNA Molecule: Synthetic oligonucleotide
auuaataaattgtcatcacc

SEQ ID NO: 2308 - DNA, 20 bp, Artificial Sequence
  Description of Artificial Sequence: Synthetic oligonucleotide
  Description of Combined DNA/RNA Molecule: Synthetic oligonucleotide
auuaataaattgtcatcacc

SEQ ID NO: 2309 - DNA, 20 bp, Artificial Sequence
  Description of Artificial Sequence: Synthetic oligonucleotide
  Description of Combined DNA/RNA Molecule: Synthetic oligonucleotide
uauuaataaattgtcatcac

SEQ ID NO: 2310 - DNA, 20 bp, Artificial Sequence
  Description of Artificial Sequence: Synthetic oligonucleotide
  Description of Combined DNA/RNA Molecule: Synthetic oligonucleotide
uauuaataaattgtcatcac

SEQ ID NO: 2311 - DNA, 20 bp, Artificial Sequence
  Description of Artificial Sequence: Synthetic oligonucleotide
  Description of Combined DNA/RNA Molecule: Synthetic oligonucleotide
uauuaataaattgtcatcac

SEQ ID NO: 2312 - DNA, 20 bp, Artificial Sequence
  Description of Artificial Sequence: Synthetic oligonucleotide
  Description of Combined DNA/RNA Molecule: Synthetic oligonucleotide
cuauuaataaattgtcatca

SEQ ID NO: 2313 - DNA, 20 bp, Artificial Sequence
  Description of Artificial Sequence: Synthetic oligonucleotide
  Description of Combined DNA/RNA Molecule: Synthetic oligonucleotide
cuauuaataaattgtcatca

SEQ ID NO: 2314 - DNA, 20 bp, Artificial Sequence
  Description of Artificial Sequence: Synthetic oligonucleotide
  Description of Combined DNA/RNA Molecule: Synthetic oligonucleotide
acuautaataaattgtcatc

SEQ ID NO: 2315 - DNA, 20 bp, Artificial Sequence
  Description of Artificial Sequence: Synthetic oligonucleotide
  Description of Combined DNA/RNA Molecule: Synthetic oligonucleotide
tgtcatcaccagaaaaaguc

SEQ ID NO: 2316 - DNA, 20 bp, Artificial Sequence
  Description of Artificial Sequence: Synthetic oligonucleotide
  Description of Combined DNA/RNA Molecule: Synthetic oligonucleotide
utgtcatcaccagaaaaagu

SEQ ID NO: 2317 - DNA, 20 bp, Artificial Sequence
  Description of Artificial Sequence: Synthetic oligonucleotide
  Description of Combined DNA/RNA Molecule: Synthetic oligonucleotide
ttgtcatcaccagaaaaagu

SEQ ID NO: 2318 - DNA, 20 bp, Artificial Sequence
  Description of Artificial Sequence: Synthetic oligonucleotide
  Description of Combined DNA/RNA Molecule: Synthetic oligonucleotide
autgtcatcaccagaaaaag

SEQ ID NO: 2319 - DNA, 20 bp, Artificial Sequence
  Description of Artificial Sequence: Synthetic oligonucleotide
attgtcatcaccagaaaaag

SEQ ID NO: 2320 - DNA, 20 bp, Artificial Sequence
  Description of Artificial Sequence: Synthetic oligonucleotide
  Description of Combined DNA/RNA Molecule: Synthetic oligonucleotide
aautgtcatcaccagaaaaa

SEQ ID NO: 2321 - DNA, 20 bp, Artificial Sequence
  Description of Artificial Sequence: Synthetic oligonucleotide
aattgtcatcaccagaaaaa

SEQ ID NO: 2322 - DNA, 20 bp, Artificial Sequence
  Description of Artificial Sequence: Synthetic oligonucleotide
aaattgtcatcaccagaaaa

SEQ ID NO: 2323 - DNA, 20 bp, Artificial Sequence
  Description of Artificial Sequence: Synthetic oligonucleotide
  Description of Combined DNA/RNA Molecule: Synthetic oligonucleotide
aaautgtcatcaccagaaaa

SEQ ID NO: 2324 - DNA, 20 bp, Artificial Sequence
  Description of Artificial Sequence: Synthetic oligonucleotide
  Description of Combined DNA/RNA Molecule: Synthetic oligonucleotide
uaaautgtcatcaccagaaa

SEQ ID NO: 2325 - DNA, 20 bp, Artificial Sequence
  Description of Artificial Sequence: Synthetic oligonucleotide
  Description of Combined DNA/RNA Molecule: Synthetic oligonucleotide
uaaautgtcatcaccagaaa

SEQ ID NO: 2326 - DNA, 20 bp, Artificial Sequence
  Description of Artificial Sequence: Synthetic oligonucleotide
  Description of Combined DNA/RNA Molecule: Synthetic oligonucleotide
auaaattgtcatcaccagaa

SEQ ID NO: 2327 - DNA, 20 bp, Artificial Sequence
  Description of Artificial Sequence: Synthetic oligonucleotide
  Description of Combined DNA/RNA Molecule: Synthetic oligonucleotide
auaaattgtcatcaccagaa

SEQ ID NO: 2328 - DNA, 20 bp, Artificial Sequence
  Description of Artificial Sequence: Synthetic oligonucleotide
  Description of Combined DNA/RNA Molecule: Synthetic oligonucleotide
aauaaattgtcatcaccaga

SEQ ID NO: 2329 - DNA, 20 bp, Artificial Sequence
  Description of Artificial Sequence: Synthetic oligonucleotide
  Description of Combined DNA/RNA Molecule: Synthetic oligonucleotide
aauaaattgtcatcaccaga

SEQ ID NO: 2330 - DNA, 20 bp, Artificial Sequence
  Description of Artificial Sequence: Synthetic oligonucleotide
  Description of Combined DNA/RNA Molecule: Synthetic oligonucleotide
aauaaattgtcatcaccaga

SEQ ID NO: 2331 - DNA, 20 bp, Artificial Sequence
  Description of Artificial Sequence: Synthetic oligonucleotide
  Description of Combined DNA/RNA Molecule: Synthetic oligonucleotide
uaauaaattgtcatcaccag

SEQ ID NO: 2332 - DNA, 20 bp, Artificial Sequence
  Description of Artificial Sequence: Synthetic oligonucleotide
  Description of Combined DNA/RNA Molecule: Synthetic oligonucleotide
uaauaaattgtcatcaccag

SEQ ID NO: 2333 - DNA, 20 bp, Artificial Sequence
  Description of Artificial Sequence: Synthetic oligonucleotide
  Description of Combined DNA/RNA Molecule: Synthetic oligonucleotide
uaauaaattgtcatcaccag

SEQ ID NO: 2334 - DNA, 20 bp, Artificial Sequence
  Description of Artificial Sequence: Synthetic oligonucleotide
  Description of Combined DNA/RNA Molecule: Synthetic oligonucleotide
uaauaaattgtcatcaccag

SEQ ID NO: 2335 - DNA, 20 bp, Artificial Sequence
  Description of Artificial Sequence: Synthetic oligonucleotide
  Description of Combined DNA/RNA Molecule: Synthetic oligonucleotide
uuaauaaattgtcatcacca

SEQ ID NO: 2336 - DNA, 20 bp, Artificial Sequence
  Description of Artificial Sequence: Synthetic oligonucleotide
  Description of Combined DNA/RNA Molecule: Synthetic oligonucleotide
uuaauaaattgtcatcacca

SEQ ID NO: 2337 - DNA, 20 bp, Artificial Sequence
  Description of Artificial Sequence: Synthetic oligonucleotide
  Description of Combined DNA/RNA Molecule: Synthetic oligonucleotide
uuaauaaattgtcatcacca

SEQ ID NO: 2338 - DNA, 20 bp, Artificial Sequence
  Description of Artificial Sequence: Synthetic oligonucleotide
  Description of Combined DNA/RNA Molecule: Synthetic oligonucleotide
uuaauaaattgtcatcacca

SEQ ID NO: 2339 - DNA, 20 bp, Artificial Sequence
  Description of Artificial Sequence: Synthetic oligonucleotide
  Description of Combined DNA/RNA Molecule: Synthetic oligonucleotide
auuaataaattgtcatcacc

SEQ ID NO: 2340 - DNA, 20 bp, Artificial Sequence
  Description of Artificial Sequence: Synthetic oligonucleotide
  Description of Combined DNA/RNA Molecule: Synthetic oligonucleotide
auuaataaattgtcatcacc

SEQ ID NO: 2341 - DNA, 20 bp, Artificial Sequence
  Description of Artificial Sequence: Synthetic oligonucleotide
  Description of Combined DNA/RNA Molecule: Synthetic oligonucleotide
auuaataaattgtcatcacc

SEQ ID NO: 2342 - DNA, 20 bp, Artificial Sequence
  Description of Artificial Sequence: Synthetic oligonucleotide
  Description of Combined DNA/RNA Molecule: Synthetic oligonucleotide
auuaataaattgtcatcacc

SEQ ID NO: 2343 - DNA, 20 bp, Artificial Sequence
  Description of Artificial Sequence: Synthetic oligonucleotide
  Description of Combined DNA/RNA Molecule: Synthetic oligonucleotide
uauuaataaattgtcatcac

SEQ ID NO: 2344 - DNA, 20 bp, Artificial Sequence
  Description of Artificial Sequence: Synthetic oligonucleotide
  Description of Combined DNA/RNA Molecule: Synthetic oligonucleotide
uauuaataaattgtcatcac

SEQ ID NO: 2345 - DNA, 20 bp, Artificial Sequence
  Description of Artificial Sequence: Synthetic oligonucleotide
  Description of Combined DNA/RNA Molecule: Synthetic oligonucleotide
uauuaataaattgtcatcac

SEQ ID NO: 2346 - DNA, 20 bp, Artificial Sequence
  Description of Artificial Sequence: Synthetic oligonucleotide
  Description of Combined DNA/RNA Molecule: Synthetic oligonucleotide
cuauuaataaattgtcatca

SEQ ID NO: 2347 - DNA, 20 bp, Artificial Sequence
  Description of Artificial Sequence: Synthetic oligonucleotide
  Description of Combined DNA/RNA Molecule: Synthetic oligonucleotide
cuauuaataaattgtcatca

SEQ ID NO: 2348 - DNA, 20 bp, Artificial Sequence
  Description of Artificial Sequence: Synthetic oligonucleotide
  Description of Combined DNA/RNA Molecule: Synthetic oligonucleotide
acuautaataaattgtcatc

SEQ ID NO: 2349 - RNA, 32 nt, Artificial Sequence; identical to SEQ ID NO: 1997
  Description of Artificial Sequence: Synthetic oligonucleotide

SEQ ID NO: 2350 - RNA, 32 nt, Artificial Sequence; identical to SEQ ID NO: 1998
  Description of Artificial Sequence: Synthetic oligonucleotide

SEQ ID NO: 2351 - DNA, 20 bp, Artificial Sequence
  Description of Artificial Sequence: Synthetic oligonucleotide
  Description of Combined DNA/RNA Molecule: Synthetic oligonucleotide
uaaautgtcatcaccagaaa

SEQ ID NO: 2352 - DNA, 20 bp, Artificial Sequence
  Description of Artificial Sequence: Synthetic oligonucleotide
  Description of Combined DNA/RNA Molecule: Synthetic oligonucleotide
auaaattgtcatcaccagaa

SEQ ID NO: 2353 - DNA, 20 bp, Artificial Sequence
  Description of Artificial Sequence: Synthetic oligonucleotide
  Description of Combined DNA/RNA Molecule: Synthetic oligonucleotide
aauaaattgtcatcaccaga

SEQ ID NO: 2354 - DNA, 20 bp, Artificial Sequence
  Description of Artificial Sequence: Synthetic oligonucleotide
  Description of Combined DNA/RNA Molecule: Synthetic oligonucleotide
uaauaaattgtcatcaccag

SEQ ID NO: 2355 - DNA, 20 bp, Artificial Sequence
  Description of Artificial Sequence: Synthetic oligonucleotide
  Description of Combined DNA/RNA Molecule: Synthetic oligonucleotide
aauaaattgtcatcaccaga

SEQ ID NO: 2356 - DNA, 20 bp, Artificial Sequence
  Description of Artificial Sequence: Synthetic oligonucleotide
  Description of Combined DNA/RNA Molecule: Synthetic oligonucleotide
uaauaaattgtcatcaccag

SEQ ID NO: 2357 - RNA, 20 nt, Artificial Sequence
  Description of Artificial Sequence: Synthetic oligonucleotide
gcacaagggcacagacuucc

SEQ ID NO: 2358 - RNA, 20 nt, Artificial Sequence
  Description of Artificial Sequence: Synthetic oligonucleotide
gcacaagggcacagacuucc

SEQ ID NO: 2359 - RNA, 20 nt, Artificial Sequence
  Description of Artificial Sequence: Synthetic oligonucleotide
cacaagggcacagacuucca

SEQ ID NO: 2360 - RNA, 20 nt, Artificial Sequence
  Description of Artificial Sequence: Synthetic oligonucleotide
cacaagggcacagacuucca

SEQ ID NO: 2361 - DNA, 20 bp, Artificial Sequence
  Description of Artificial Sequence: Synthetic oligonucleotide
  Description of Combined DNA/RNA Molecule: Synthetic oligonucleotide
uaaautgtcatcaccagaaa

SEQ ID NO: 2362 - DNA, 20 bp, Artificial Sequence
  Description of Artificial Sequence: Synthetic oligonucleotide
  Description of Combined DNA/RNA Molecule: Synthetic oligonucleotide
auaaattgtcatcaccagaa

SEQ ID NO: 2363 - DNA, 20 bp, Artificial Sequence
  Description of Artificial Sequence: Synthetic oligonucleotide
  Description of Combined DNA/RNA Molecule: Synthetic oligonucleotide
aauaaattgtcatcaccaga

SEQ ID NO: 2364 - DNA, 20 bp, Artificial Sequence
  Description of Artificial Sequence: Synthetic oligonucleotide
  Description of Combined DNA/RNA Molecule: Synthetic oligonucleotide
uaauaaattgtcatcaccag

SEQ ID NO: 2365 - RNA, 20 nt, Artificial Sequence
  Description of Artificial Sequence: Synthetic oligonucleotide
uccccacagagggaggaagc

SEQ ID NO: 2366 - RNA, 20 nt, Artificial Sequence
  Description of Artificial Sequence: Synthetic oligonucleotide
cuccccacagagggaggaag

SEQ ID NO: 2367 - RNA, 20 nt, Artificial Sequence
  Description of Artificial Sequence: Synthetic oligonucleotide
ccuccccacagagggaggaa

SEQ ID NO: 2368 - RNA, 20 nt, Artificial Sequence
  Description of Artificial Sequence: Synthetic oligonucleotide
uccuccccacagagggagga

SEQ ID NO: 2369 - RNA, 20 nt, Artificial Sequence
  Description of Artificial Sequence: Synthetic oligonucleotide
guccuccccacagagggagg

SEQ ID NO: 2370 - DNA, 20 bp, Artificial Sequence
  Description of Artificial Sequence: Synthetic oligonucleotide
  Description of Combined DNA/RNA Molecule: Synthetic oligonucleotide
ggucctccccacagagggag

SEQ ID NO: 2371 - DNA, 20 bp, Artificial Sequence
  Description of Artificial Sequence: Synthetic oligonucleotide
  Description of Combined DNA/RNA Molecule: Synthetic oligonucleotide
gggucctccccacagaggga

SEQ ID NO: 2372 - DNA, 20 bp, Artificial Sequence
  Description of Artificial Sequence: Synthetic oligonucleotide
  Description of Combined DNA/RNA Molecule: Synthetic oligonucleotide
cgggucctccccacagaggg

SEQ ID NO: 2373 - DNA, 20 bp, Artificial Sequence
  Description of Artificial Sequence: Synthetic oligonucleotide
  Description of Combined DNA/RNA Molecule: Synthetic oligonucleotide
acaguagatgagggagcagg

SEQ ID NO: 2374 - DNA, 20 bp, Artificial Sequence
  Description of Artificial Sequence: Synthetic oligonucleotide
cacagtagatgagggagcag

SEQ ID NO: 2375 - DNA, 20 bp, Artificial Sequence
  Description of Artificial Sequence: Synthetic oligonucleotide
acacagtagatgagggagca

SEQ ID NO: 2376 - DNA, 20 bp, Artificial Sequence
  Description of Artificial Sequence: Synthetic oligonucleotide
cacacagtagatgagggagc

SEQ ID NO: 2377 - DNA, 20 bp, Artificial Sequence
  Description of Artificial Sequence: Synthetic oligonucleotide
gcacacagtagatgagggag

SEQ ID NO: 2378 - DNA, 20 bp, Artificial Sequence
  Description of Artificial Sequence: Synthetic oligonucleotide
  Description of Combined DNA/RNA Molecule: Synthetic oligonucleotide
ugcacacagtagatgaggga

SEQ ID NO: 2379 - DNA, 20 bp, Artificial Sequence
  Description of Artificial Sequence: Synthetic oligonucleotide
  Description of Combined DNA/RNA Molecule: Synthetic oligonucleotide
gugcacacagtagatgaggg

SEQ ID NO: 2380 - DNA, 20 bp, Artificial Sequence
  Description of Artificial Sequence: Synthetic oligonucleotide
  Description of Combined DNA/RNA Molecule: Synthetic oligonucleotide
agugcacacagtagaugagg

SEQ ID NO: 2381 - RNA, 20 nt, Artificial Sequence
  Description of Artificial Sequence: Synthetic oligonucleotide
uccccacagagggaggaagc

SEQ ID NO: 2382 - RNA, 20 nt, Artificial Sequence
  Description of Artificial Sequence: Synthetic oligonucleotide
cuccccacagagggaggaag

SEQ ID NO: 2383 - RNA, 20 nt, Artificial Sequence
  Description of Artificial Sequence: Synthetic oligonucleotide
ccuccccacagagggaggaa

SEQ ID NO: 2384 - RNA, 20 nt, Artificial Sequence
  Description of Artificial Sequence: Synthetic oligonucleotide
uccuccccacagagggagga

SEQ ID NO: 2385 - RNA, 20 nt, Artificial Sequence
  Description of Artificial Sequence: Synthetic oligonucleotide
guccuccccacagagggagg

SEQ ID NO: 2386 - DNA, 20 bp, Artificial Sequence
  Description of Artificial Sequence: Synthetic oligonucleotide
  Description of Combined DNA/RNA Molecule: Synthetic oligonucleotide
ggucctccccacagagggag

SEQ ID NO: 2387 - DNA, 20 bp, Artificial Sequence
  Description of Artificial Sequence: Synthetic oligonucleotide
  Description of Combined DNA/RNA Molecule: Synthetic oligonucleotide
gggucctccccacagaggga

SEQ ID NO: 2388 - DNA, 20 bp, Artificial Sequence
  Description of Artificial Sequence: Synthetic oligonucleotide
  Description of Combined DNA/RNA Molecule: Synthetic oligonucleotide
cgggucctccccacagaggg

SEQ ID NO: 2389 - DNA, 20 bp, Artificial Sequence
  Description of Artificial Sequence: Synthetic oligonucleotide
  Description of Combined DNA/RNA Molecule: Synthetic oligonucleotide
acaguagatgagggagcagg

SEQ ID NO: 2390 - DNA, 20 bp, Artificial Sequence
  Description of Artificial Sequence: Synthetic oligonucleotide
cacagtagatgagggagcag

SEQ ID NO: 2391 - DNA, 20 bp, Artificial Sequence
  Description of Artificial Sequence: Synthetic oligonucleotide
acacagtagatgagggagca

SEQ ID NO: 2392 - DNA, 20 bp, Artificial Sequence
  Description of Artificial Sequence: Synthetic oligonucleotide
cacacagtagatgagggagc

SEQ ID NO: 2393 - DNA, 20 bp, Artificial Sequence
  Description of Artificial Sequence: Synthetic oligonucleotide
gcacacagtagatgagggag

SEQ ID NO: 2394 - DNA, 20 bp, Artificial Sequence
  Description of Artificial Sequence: Synthetic oligonucleotide
  Description of Combined DNA/RNA Molecule: Synthetic oligonucleotide
ugcacacagtagatgaggga

SEQ ID NO: 2395 - DNA, 20 bp, Artificial Sequence
  Description of Artificial Sequence: Synthetic oligonucleotide
  Description of Combined DNA/RNA Molecule: Synthetic oligonucleotide
gugcacacagtagatgaggg

SEQ ID NO: 2396 - DNA, 20 bp, Artificial Sequence
  Description of Artificial Sequence: Synthetic oligonucleotide
  Description of Combined DNA/RNA Molecule: Synthetic oligonucleotide
agugcacacagtagaugagg

SEQ ID NO: 2397 - DNA, 20 bp, Artificial Sequence
  Description of Artificial Sequence: Synthetic oligonucleotide
ggcacaagggcacagacttc

SEQ ID NO: 2398 - RNA, 20 nt, Artificial Sequence
  Description of Artificial Sequence: Synthetic oligonucleotide
ggcacaagggcacagacuuc

SEQ ID NO: 2399 - DNA, 20 bp, Artificial Sequence
  Description of Artificial Sequence: Synthetic oligonucleotide
  Description of Combined DNA/RNA Molecule: Synthetic oligonucleotide
gggucctccccacagaggga

SEQ ID NO: 2400 - DNA, 20 bp, Artificial Sequence
  Description of Artificial Sequence: Synthetic oligonucleotide
  Description of Combined DNA/RNA Molecule: Synthetic oligonucleotide
gggucctccccacagaggga

SEQ ID NO: 2401 - DNA, 20 bp, Artificial Sequence
  Description of Artificial Sequence: Synthetic oligonucleotide
  Description of Combined DNA/RNA Molecule: Synthetic oligonucleotide
gggucctccccacagaggga

SEQ ID NO: 2402 - DNA, 20 bp, Artificial Sequence
  Description of Artificial Sequence: Synthetic oligonucleotide
  Description of Combined DNA/RNA Molecule: Synthetic oligonucleotide
gggucctccccacagaggga

SEQ ID NO: 2403 - DNA, 20 bp, Artificial Sequence
  Description of Artificial Sequence: Synthetic oligonucleotide
  Description of Combined DNA/RNA Molecule: Synthetic oligonucleotide
ggguuctccccacagaggga

SEQ ID NO: 2404 - RNA, 20 nt, Artificial Sequence
  Description of Artificial Sequence: Synthetic oligonucleotide
ggcacaagggcacagacuuc

SEQ ID NO: 2405 - RNA, 20 nt, Artificial Sequence
  Description of Artificial Sequence: Synthetic oligonucleotide
ggcacaagggcacagacuuc

SEQ ID NO: 2406 - RNA, 20 nt, Artificial Sequence
  Description of Artificial Sequence: Synthetic oligonucleotide
ggcacaagggcacagacuuc

SEQ ID NO: 2407 - RNA, 20 nt, Artificial Sequence
  Description of Artificial Sequence: Synthetic oligonucleotide
ggcacaagggcacagacuuc

SEQ ID NO: 2408 - RNA, 20 nt, Artificial Sequence
  Description of Artificial Sequence: Synthetic oligonucleotide
ggcacaagggcacagacuuc

SEQ ID NO: 2409 - RNA, 20 nt, Artificial Sequence
  Description of Artificial Sequence: Synthetic oligonucleotide
ggcacaagggcacagacuuc

SEQ ID NO: 2410 - RNA, 20 nt, Artificial Sequence
  Description of Artificial Sequence: Synthetic oligonucleotide
ggcacaagggcacagacuuc

SEQ ID NO: 2411 - RNA, 20 nt, Artificial Sequence
  Description of Artificial Sequence: Synthetic oligonucleotide
ggcacaagggcacagacuuc

SEQ ID NO: 2412 - RNA, 20 nt, Artificial Sequence
  Description of Artificial Sequence: Synthetic oligonucleotide
ggcacaagggcacagacuuc

SEQ ID NO: 2413 - RNA, 20 nt, Artificial Sequence
  Description of Artificial Sequence: Synthetic oligonucleotide
ggcacaagggcacagacuuc

SEQ ID NO: 2414 - RNA, 20 nt, Artificial Sequence
  Description of Artificial Sequence: Synthetic oligonucleotide
ggcacaagggcacagacuuc

SEQ ID NO: 2415 - RNA, 20 nt, Artificial Sequence
  Description of Artificial Sequence: Synthetic oligonucleotide
ggcacaagggcacagacuuc

SEQ ID NO: 2416 - RNA, 20 nt, Artificial Sequence
  Description of Artificial Sequence: Synthetic oligonucleotide
ggcacaagggcacagacuuc

SEQ ID NO: 2417 - RNA, 21 nt, Artificial Sequence
  Description of Artificial Sequence: Synthetic oligonucleotide
ggaagucugugcccguguucc

SEQ ID NO: 2418 - RNA, 20 nt, Artificial Sequence
  Description of Artificial Sequence: Synthetic oligonucleotide
ggcacaagggcacagacuuc

SEQ ID NO: 2419 - RNA, 20 nt, Artificial Sequence
  Description of Artificial Sequence: Synthetic oligonucleotide
ucaaggaagauggcauuucu

SEQ ID NO: 2420 - RNA, 20 nt, Artificial Sequence
  Description of Artificial Sequence: Synthetic oligonucleotide
ucaaggaagauggcauuucu

SEQ ID NO: 2421 - RNA, 20 nt, Artificial Sequence
  Description of Artificial Sequence: Synthetic oligonucleotide
ucaaggaagauggcauuucu

SEQ ID NO: 2422 - RNA, 20 nt, Artificial Sequence
  Description of Artificial Sequence: Synthetic oligonucleotide
ucaaggaagauggcauuucu

SEQ ID NO: 2423 - RNA, 20 nt, Artificial Sequence
  Description of Artificial Sequence: Synthetic oligonucleotide
ucaaggaagauggcauuucu

SEQ ID NO: 2424 - DNA, 21 bp, Artificial Sequence
  Description of Artificial Sequence: Synthetic primer
gtgatggtgggtgaccttgag

SEQ ID NO: 2425 - DNA, 19 bp, Artificial Sequence
  Description of Artificial Sequence: Synthetic primer
tttgggcagcggtaatgag

SEQ ID NO: 2426 - DNA, 17 bp, Artificial Sequence
  Description of Artificial Sequence: Synthetic probe
caagcagaaggcaacaa

SEQ ID NO: 2427 - DNA, 26 bp, Artificial Sequence
  Description of Artificial Sequence: Synthetic primer
tgaaaataagctcaagcagacaaatc

SEQ ID NO: 2428 - DNA, 20 bp, Artificial Sequence
  Description of Artificial Sequence: Synthetic primer
gacgcctctgttccaaatcc

SEQ ID NO: 2429 - DNA, 18 bp, Artificial Sequence
  Description of Artificial Sequence: Synthetic probe
cagtggataaaggcaaca

SEQ ID NO: 2430 - DNA, 10 bp, Artificial Sequence
  Description of Artificial Sequence: Synthetic oligonucleotide
agaaatgcca

SEQ ID NO: 2431 - DNA, 10 bp, Artificial Sequence
  Description of Artificial Sequence: Synthetic oligonucleotide
tcttccttga

SEQ ID NO: 2432 - RNA, 20 nt, Artificial Sequence
  Description of Artificial Sequence: Synthetic oligonucleotide
ucaaggaagauggcauuucu

SEQ ID NO: 2433 - DNA, 60 bp, Mus sp.
gtggttactaaggaaactgtcatctccaaactagaaatgccatcttctttgctgttggag

SEQ ID NO: 2434 - DNA, 60 bp, Homo sapiens
gtggttactaaggaaactgccatctccaaactagaaatgccatcttccttgatgttggag
